(19) United States
(12) Patent Application Publication
(10) Pub. No.: US 2016/0022840 A1
(43) Pub. Date: Jan. 28, 2016

(54) HETEROLOGOUS UNTRANSLATED REGIONS FOR MRNA

(71) Applicant: MODERNA THERAPEUTICS, INC., Cambridge, MA (US)

(72) Inventors: Tirtha Chakraborty, Medford, MA (US); Antonin de Fougerolles, Waterloo (BE)

(21) Appl. No.: 14/773,785

(22) PCT Filed: Mar. 7, 2014
(86) PCT No.: PCT/US14/21522

§ 371 Date: Sep. 9, 2015

Related U.S. Application Data
(60) Provisional application No. 61/775,509, filed on Mar. 9, 2013.
(60) Provisional application No. 61/829,372, filed on May 31, 2013.

(51) Int. Cl. A61K 48/00; A61K 38/19

(52) U.S. Cl. CPC A61K 48/0066; A61K 38/193

(57) ABSTRACT

The invention relates to compositions and methods for the manufacture and optimization of modified mRNA molecules via optimization of their terminal architecture.

### CROSS REFERENCE TO RELATED APPLICATIONS

[0001] This application claims priority to U.S. Provisional Patent Application No. 61/775,509, filed Mar. 9, 2013, entitled Heterologous Untranslated Regions for mRNA and U.S. Provisional Patent Application No. 61/829,372, filed May 31, 2013, entitled Heterologous Untranslated Regions for mRNA, the contents of each of which are herein incorporated by reference in its entirety.

### REFERENCE TO SEQUENCE LISTING

[0002] The present application is being filed along with a Sequence Listing in electronic format. The Sequence Listing is provided as a file entitled M42PCT.txt created on Mar. 7, 2014 which is 705,473 bytes in size. The information in electronic format of the sequence listing is incorporated herein by reference in its entirety.

### FIELD OF THE INVENTION

[0003] The invention relates to compositions and methods for the manufacture of modified and terminally optimized mRNA.

### BACKGROUND OF THE INVENTION

[0004] Naturally occurring RNAs are synthesized from four basic ribonucleotides: ATP, CTP, UTP and GTP, but may contain post-transcriptionally modified nucleotides. Further, approximately one hundred different nucleoside modifications have been identified in RNA (Rozenski, J, Crain, P, and McCloskey, J. (1999). The RNA Modification Database: 1999 update. Nucl Acids Res 27: 196-197).

[0005] There are multiple problems with prior methodologies of effecting protein expression. For example, heterologous deoxyribonucleic acid (DNA) introduced into a cell can be inherited by daughter cells (whether or not the heterologous DNA has integrated into the chromosome) or by offspring. Introduced DNA can integrate into host cell genomic DNA at some frequency, resulting in alterations and/or damage to the host cell genomic DNA. In addition, multiple steps must occur before a protein is made. Once inside the cell, DNA must be transported into the nucleus where it is transcribed into RNA. The RNA transcribed from DNA must then enter the cytoplasm where it is translated into protein. This need for multiple processing steps creates lag times before the generation of a protein of interest. Further, it is difficult to obtain DNA expression in cells; frequently DNA enters cells but is not expressed or not expressed at reasonable rates or concentrations. This can be a particular problem when DNA is introduced into cells such as primary cells or modified cell lines. The role of nucleoside modifications on the immuno-stimulatory potential, stability, and on the translation efficiency of RNA, and the consequent benefits to this for enhancing protein expression and producing therapeutics however, is unclear.

[0006] There is a need in the art, therefore, for biological modalities to address the modulation of intracellular translation of nucleic acids. The present invention addresses this need by providing methods and compositions for the manufacture and optimization of modified mRNA molecules via alteration of the terminal architecture of the molecules.

### SUMMARY OF THE INVENTION

[0007] Described herein are compositions and methods for the manufacture and optimization of modified mRNA molecules via alteration of the terminal architecture of the molecules. Specifically disclosed are methods for increasing or altering protein production or localization by altering the 5′UTR of modified mRNAs.

[0008] In one aspect, provided is a synthetic isolated RNA comprising a first region of linked nucleosides encoding a polypeptide of interest, a first flanking region located at the 5′ terminus of the first region, a second flanking region located at the 3′ terminus of the first region and a 3′ tailing region of linked nucleosides. Any of the first region, first flanking region, second flanking region or a 3′ tailing region may comprise at least one modified nucleoside. In one aspect, the at least one modified nucleoside is not 5-methylcytosine or pseudouridine.

[0009] The first flanking region may comprise a 5′ untranslated region (UTR) which may be the native 5′UTR of the encoded polypeptide of interest. The 5′UTR may comprise a translation initiation sequence such as, but not limited to, a Kozak sequence and an internal ribosome entry site (IRES). In one aspect, the first flanking region comprises a structured UTR which may slow scanning and/or translation.

[0010] The first flanking region may comprise a 5′ untranslated region (UTR) which may be a heterologous 5′UTR. The 5′UTR may comprise a translation initiation sequence such as, but not limited to, a Kozak sequence and an internal ribosome entry site (IRES). In one aspect, the first flanking region comprises a structured UTR which may slow scanning and/or translation. In one aspect, the heterologous 5′UTR is not derived from the beta-globin gene.

[0011] The first flanking region may comprise at least one 5′ cap structure such as, but not limited to, Cap0, Cap1, ARCA, inosine, N1-methyl-guanosine, 2′fluoro-guanosine, 7-deaza-guanosine, 8-oxo-guanosine, 2-amino-guanosine, LNA-guanosine, 2-azido-guanosine, Cap2 and Cap4.

[0012] The second flanking region may a 3′ UTR which may be the native 3′ UTR of the encoded polypeptide of interest.

[0013] The 3′ tailing region may include a PolyA tail, a PolyA-G quartet or a triple helix. The PolyA tail may be approximately 150 to 170 nucleotides in length such as, but not limited to, approximately 160 nucleotides in length.

[0014] In one aspect, the 3′ tailing region comprises a triple helix. The triple helix may comprise a first U-rich region, a second U-rich region and an A-rich region. The first U-rich region may comprise SEQ ID NO: 1 and the second U-rich region may comprise SEQ ID NO: 2 or SEQ ID NO: 3. The A-rich region may comprise SEQ ID NO: 4.

[0015] The second flanking region may comprise at least one sensor region such as, but not limited to, at least one miR binding site. The miR binding site may comprise a sequence such as, but not limited to, any of SEQ ID NOs: 1170-2190 and 3212-4232. As a non-limiting example, the miR binding site may bind to mir-122. The second terminal region may comprise one, two, three, four or more miR binding sites. Each of the miR binding sites may bind to a miR expressed in a single tissue type such as, but not limited to, the liver. The miR binding sites in the second terminal region may be the same or different. In one aspect, the miR binding site may lack the miR seed.

[0016] In another aspect, provided is a method of producing a protein of interest comprising contacting a mammalian cell, tissue or organ with a synthetic isolated RNA comprising a first region of linked nucleosides encoding a polypeptide of interest, a first flanking region located at the 5′ terminus of the first region comprising a 5′ cap structure, a second terminal region located at the 3′ terminus of the first region and a 3′ tailing region of linked nucleosides. The second flanking region may comprise at least one miR binding site and/or the 3′ terminus may comprise a triple helix.

[0017] In one aspect, provided are pharmaceutical compositions comprising the synthetic isolated RNA and a pharmaceutically acceptable excipient.

[0018] In one aspect, provided is a method of selectively producing a protein of interest in a mammalian tissue or organ comprising a mammalian tissue or organ with an auxotrophic mRNA. The auxotrophic mRNA may comprise at least one modified nucleoside.

[0019] In one embodiment, provided is a method for the generation of an enhanced modified RNA, comprising the steps of providing a codon-optimized deoxyribonucleic acid (DNA) template comprising a translatable region encoded therein followed by contacting the DNA with an RNA polymerase in the presence of a nucleotide mixture under conditions such that a modified RNA is generated, wherein the nucleotide mixture comprises one or more non-naturally occurring nucleotides and contacting the generated modified RNA with a first RNA modifying enzyme, wherein said RNA modifying enzyme alters at least one terminus of the modified RNA thereby generating an enhanced RNA. By this method is produced an enhanced modified RNA which is translationally superior to an unmodified RNA encoded by a DNA template having the same translatable region. In one embodiment, the translatable region encodes a polypeptide between 2 and about 5000 amino acids in length.

[0020] Once a modified RNA is generated, its function may be enhanced via treatment with one or more enzymes which effect 5′ capping and poly-A tail addition. The combination of the modified RNA having a 5′ cap structure of the present invention and the unique poly-A tail length taught herein, results in the unexpected property of increased protein production in a dose dependent manner.

[0021] The details of various embodiments of the invention are set forth in the description below. Other features, objects, and advantages of the invention will be apparent from the description and the drawings, and from the claims.

### BRIEF DESCRIPTION OF THE DRAWINGS

[0022] FIG. 1 is a schematic of a primary construct of the present invention.

[0023] FIG. 2 is an expanded schematic of the second flanking region of a primary construct of the present invention illustrating the sensor elements of the polynucleotide.

[0024] FIG. 3 is a clone map useful in the present invention.

[0025] FIG. 4 is a histogram showing the improved protein production from modified mRNAs of the present invention having increasingly longer poly-A tails at two concentrations.

### DETAILED DESCRIPTION

[0026] Described herein are compositions and methods for the manufacture and optimization of modified mRNA molecules via alteration of the terminal architecture of the molecules. Specifically disclosed are methods for increasing protein production by altering the terminal regions of the mRNA. Such terminal regions include at least the 5′untranslated region (UTR), and 3′UTR. Other features which may be modified and found to the 5′ or 3′ of the coding region include the 5′ cap and poly-A tail of the modified mRNAs (modified RNAs).

[0027] In general, exogenous nucleic acids, particularly viral nucleic acids, introduced into cells induce an innate immune response, resulting in interferon (IFN) production and cell death. However, it is of great interest for therapeutics, diagnostics, reagents and for biological assays to deliver a nucleic acid, e.g., a ribonucleic acid (RNA) inside a cell, either in vivo or ex vivo, such as to cause intracellular translation of the nucleic acid and production of the encoded protein. Of particular importance is the delivery and function of a non-integrative nucleic acid, as nucleic acids characterized by integration into a target cell are generally imprecise in their expression levels, deleteriously transferable to progeny and neighbor cells, and suffer from the substantial risk of mutation.

[0028] The terminal modification described herein may be used in the modified nucleic acids encoding polypeptides of interest, such as, but not limited to, the polypeptides of interest (or the nucleic acids encoding said polypeptides of interest) described in U.S. Provisional Patent Application No. 61/618,862, filed Apr. 2, 2012, entitled Modified Polynucleotides for the Production of Biologics; U.S. Provisional Patent Application No. 61/681,645, filed Aug. 10, 2012, entitled Modified Polynucleotides for the Production of Biologics; U.S. Provisional Patent Application No. 61/737,130, filed Dec. 14, 2012, entitled Modified Polynucleotides for the Production of Biologics; U.S. Provisional Patent Application No. 61/618,866, filed Apr. 2, 2012, entitled Modified Polynucleotides for the Production of Antibodies; U.S. Provisional Patent Application No. 61/681,647, filed Aug. 10, 2012, entitled Modified Polynucleotides for the Production of Antibodies; U.S. Provisional Patent Application No. 61/737,134, filed Dec. 14, 2012, entitled Modified Polynucleotides for the Production of Antibodies; U.S. Provisional Patent Application No. 61/618,868, filed Apr. 2, 2012, entitled Modified Polynucleotides for the Production of Vaccines; U.S. Provisional Patent Application No. 61/681,648, filed Aug. 10, 2012, entitled Modified Polynucleotides for the Production of Vaccines; U.S. Provisional Patent Application No. 61/737,135, filed Dec. 14, 2012, entitled Modified Polynucleotides for the Production of Vaccines; U.S. Provisional Patent Application No. 61/618,870, filed Apr. 2, 2012, entitled Modified Polynucleotides for the Production of Therapeutic Proteins and Peptides; U.S. Provisional Patent Application No. 61/681,649, filed Aug. 10, 2012, entitled Modified Polynucleotides for the Production of Therapeutic Proteins and Peptides; U.S. Provisional Patent Application No. 61/737,139, filed Dec. 14, 2012, Modified Polynucleotides for the Production of Therapeutic Proteins and Peptides; U.S. Provisional Patent Application No. 61/618,873, filed Apr. 2, 2012, entitled Modified Polynucleotides for the Production of Secreted Proteins; U.S. Provisional Patent Application No. 61/681,650, filed Aug. 10, 2012, entitled Modified Polynucleotides for the Production of Secreted Proteins; U.S. Provisional Patent Application No. 61/737,147, filed Dec. 14, 2012, entitled Modified Polynucleotides for the Production of Secreted Proteins; U.S. Provisional Patent Application No. 61/618,878, filed Apr. 2, 2012, entitled Modified Polynucleotides for the Production of Plasma Membrane Proteins; U.S. Provisional Patent Application No. 61/681,654, filed Aug. 10, 2012, entitled Modified Polynucleotides for the Production of Plasma Membrane Proteins; U.S. Provisional Patent Application No. 61/737,152, filed Dec. 14, 2012, entitled Modified Polynucleotides for the Production of Plasma Membrane Proteins; U.S. Provisional Patent Application No. 61/618,885, filed Apr. 2, 2012, entitled Modified Polynucleotides for the Production of Cytoplasmic and Cytoskeletal Proteins; U.S. Provisional Patent Application No. 61/681,658, filed Aug. 10, 2012, entitled Modified Polynucleotides for the Production of Cytoplasmic and Cytoskeletal Proteins; U.S. Provisional Patent Application No. 61/737,155, filed Dec. 14, 2012, entitled Modified Polynucleotides for the Production of Cytoplasmic and Cytoskeletal Proteins; U.S. Provisional Patent Application No. 61/618,896, filed Apr. 2, 2012, entitled Modified Polynucleotides for the Production of Intracellular Membrane Bound Proteins; U.S. Provisional Patent Application No. 61/668,157, filed Jul. 5, 2012, entitled Modified Polynucleotides for the Production of Intracellular Membrane Bound Proteins; U.S. Provisional Patent Application No. 61/681,661, filed Aug. 10, 2012, entitled Modified Polynucleotides for the Production of Intracellular Membrane Bound Proteins; U.S. Provisional Patent Application No. 61/737,160, filed Dec. 14, 2012, entitled Modified Polynucleotides for the Production of Intracellular Membrane Bound Proteins; U.S. Provisional Patent Application No. 61/618,911, filed Apr. 2, 2012, entitled Modified Polynucleotides for the Production of Nuclear Proteins; U.S. Provisional Patent Application No. 61/681,667, filed Aug. 10, 2012, entitled Modified Polynucleotides for the Production of Nuclear Proteins; U.S. Provisional Patent Application No. 61/737,168, filed Dec. 14, 2012, entitled Modified Polynucleotides for the Production of Nuclear Proteins; U.S. Provisional Patent Application No. 61/618,922, filed Apr. 2, 2012, entitled Modified Polynucleotides for the Production of Proteins; U.S. Provisional Patent Application No. 61/681,675, filed Aug. 10, 2012, entitled Modified Polynucleotides for the Production of Proteins; U.S. Provisional Patent Application No. 61/737,174, filed Dec. 14, 2012, entitled Modified Polynucleotides for the Production of Proteins; U.S. Provisional Patent Application No. 61/618,935, filed Apr. 2, 2012, entitled Modified Polynucleotides for the Production of Proteins Associated with Human Disease; U.S. Provisional Patent Application No. 61/681,687, filed Aug. 10, 2012, entitled Modified Polynucleotides for the Production of Proteins Associated with Human Disease; U.S. Provisional Patent Application No. 61/737,184, filed Dec. 14, 2012, entitled Modified Polynucleotides for the Production of Proteins Associated with Human Disease; U.S. Provisional Patent Application No. 61/618,945, filed Apr. 2, 2012, entitled Modified Polynucleotides for the Production of Proteins Associated with Human Disease; U.S. Provisional Patent Application No. 61/681,696, filed Aug. 10, 2012, entitled Modified Polynucleotides for the Production of Proteins Associated with Human Disease; U.S. Provisional Patent Application No. 61/737,191, filed Dec. 14, 2012, entitled Modified Polynucleotides for the Production of Proteins Associated with Human Disease; U.S. Provisional Patent Application No. 61/618,953, filed Apr. 2, 2012, entitled Modified Polynucleotides for the Production of Proteins Associated with Human Disease; U.S. Provisional Patent Application No. 61/681,704, filed Aug. 10, 2012, entitled Modified Polynucleotides for the Production of Proteins Associated with Human Disease; U.S. Provisional Patent Application No. 61/737,203, filed Dec. 14, 2012, entitled Modified Polynucleotides for the Production of Proteins Associated with Human Disease; U.S. Provisional Patent Application No. 61/681,720, filed Aug. 10, 2012, entitled Modified Polynucleotides for the Production of Cosmetic Proteins and Peptides; U.S. Provisional Patent Application No. 61/737,213, filed Dec. 14, 2012, entitled Modified Polynucleotides for the Production of Cosmetic Proteins and Peptides; U.S. Provisional Patent Application No. 61/681,742, filed Aug. 10, 2012, entitled Modified Polynucleotides for the Production of Oncology-Related Proteins and Peptides; International Application No PCT/US2013/030062, filed Mar. 9, 2013, entitled Modified Polynucleotides for the Production of Biologics and Proteins Associated with Human Disease; U.S. patent application Ser. No. 13/791,922, filed Mar. 9, 2013, entitled Modified Polynucleotides for the Production of Biologics and Proteins Associated with Human Disease; International Application No PCT/US2013/030063, filed Mar. 9, 2013, entitled Modified Polynucleotides; International Application No. PCT/US2013/030064, entitled Modified Polynucleotides for the Production of Secreted Proteins; U.S. patent application Ser. No. 13/791,921, filed Mar. 9, 2013, entitled Modified Polynucleotides for the Production of Secreted Proteins; International Application No PCT/US2013/030059, filed Mar. 9, 2013, entitled Modified Polynucleotides for the Production of Membrane Proteins; International Application No. PCT/US2013/030066, filed Mar. 9, 2013, entitled Modified Polynucleotides for the Production of Cytoplasmic and Cytoskeletal Proteins; International Application No. PCT/US2013/030067, filed Mar. 9, 2013, entitled Modified Polynucleotides for the Production of Nuclear Proteins; International Application No. PCT/US2013/030060, filed Mar. 9, 2013, entitled Modified Polynucleotides for the Production of Proteins; International Application No. PCT/US2013/030061, filed Mar. 9, 2013, entitled Modified Polynucleotides for the Production of Proteins Associated with Human Disease; U.S. patent application Ser. No. 13/791,910, filed Mar. 9, 2013, entitled Modified Polynucleotides for the Production of Proteins Associated with Human Disease; International Application No. PCT/US2013/030068, filed Mar. 9, 2013, entitled Modified Polynucleotides for the Production of Cosmetic Proteins and Peptides; and International Application No. PCT/US2013/030070, filed Mar. 9, 2013, entitled Modified Polynucleotides for the Production of Oncology-Related Proteins and Peptides; International Patent Application No. PCT/US2013/031821, filed Mar. 15, 2013, entitled In Vivo Production of Proteins; the contents of each of which are herein incorporated by reference in their entireties.

[0029] Provided herein in part are nucleic acid molecules encoding polypeptides capable of modulating a cell's status, function and/or activity, and methods of making and using these nucleic acids and polypeptides. As described herein and as in copending, co-owned applications International Publication WO2012019168 filed Aug. 5, 2011 and WO2012045082 and WO2012045075 filed Oct. 3, 2011, the contents of which are incorporated by reference herein in their entirety, these modified nucleic acid molecules are capable of reducing the innate immune activity of a population of cells into which they are introduced, thus increasing the efficiency of protein production in that cell population.

[0030] In addition to utilization of non-natural nucleosides and nucleotides in the modified RNAs of the present invention, it has now been discovered that concomitant use of altered terminal architecture may also serve to increase protein production from a cell population.

### I. Compositions of the Invention

[0031] This invention provides nucleic acid molecules, including RNAs such as mRNAs that contain one or more modified nucleosides (termed “modified nucleic acids” or “modified nucleic acid molecules”) and polynucleotides, primary constructs and modified mRNA (mmRNA), which have useful properties including the lack of a substantial induction of the innate immune response of a cell into which the mRNA is introduced. Because these modified nucleic acids enhance the efficiency of protein production, intracellular retention of nucleic acids, and viability of contacted cells, as well as possess reduced immunogenicity, these nucleic acids having these properties are termed “enhanced” nucleic acids or modified RNAs herein.

[0032] In one embodiment, the polynucleotides are nucleic acid transcripts which encode one or more polypeptides of interest that, when translated, deliver a signal to the cell which results in the therapeutic benefit to the organism. The signal polynucleotides may optionally further comprise a sequence (translatable or not) which sense the microenvironment of the polynucleotide and alters (a) the function or phenotype outcome associated with the peptide or protein which is translated, (b) the expression level of the signal polynucleotide, and/or both.

[0033] The term “nucleic acid,” in its broadest sense, includes any compound and/or substance that comprise a polymer of nucleotides. These polymers are often referred to as polynucleotides.

[0034] Exemplary nucleic acids include ribonucleic acids (RNAs), deoxyribonucleic acids (DNAs), threose nucleic acids (TNAs), glycol nucleic acids (GNAs), peptide nucleic acids (PNAs), locked nucleic acids (LNAs) or hybrids thereof. They may also include RNAi-inducing agents, RNAi agents, siRNAs, shRNAs, miRNAs, antisense RNAs, ribozymes, catalytic DNA, tRNA, RNAs that induce triple helix formation, aptamers, vectors, etc. In preferred embodiments, the modified nucleic acid molecule is one or more messenger RNAs (mRNAs).

[0035] In preferred embodiments, the polynucleotide or nucleic acid molecule is a messenger RNA (mRNA). As used herein, the term “messenger RNA” (mRNA) refers to any polynucleotide which encodes a polypeptide of interest and which is capable of being translated to produce the encoded polypeptide of interest in vitro, in vivo, in situ or ex vivo. Polynucleotides of the invention may be mRNA or any nucleic acid molecule and may or may not be chemically modified.

[0036] Traditionally, the basic components of an mRNA molecule include at least a coding region, a 5′UTR, a 3′UTR, a 5′ cap and a poly-A tail. Building on this wild type modular structure, the present invention expands the scope of functionality of traditional mRNA molecules by providing polynucleotides or primary RNA constructs which maintain a modular organization, but which comprise one or more structural and/or chemical modifications or alterations which impart useful properties to the polynucleotide including, in some embodiments, the lack of a substantial induction of the innate immune response of a cell into which the polynucleotide is introduced. As such, modified mRNA molecules of the present invention are termed “mmRNA.” As used herein, a “structural” feature or modification is one in which two or more linked nucleotides are inserted, deleted, duplicated, inverted or randomized in a polynucleotide polynucleotide, primary construct or mmRNA without significant chemical modification to the nucleotides themselves. Because chemical bonds will necessarily be broken and reformed to effect a structural modification, structural modifications are of a chemical nature and hence are chemical modifications. However, structural modifications will result in a different sequence of nucleotides. For example, the polynucleotide “ATCG” may be chemically modified to “AT-5meC-G”. The same polynucleotide may be structurally modified from “ATCG” to “ATCCCG”. Here, the dinucleotide “CC” has been inserted, resulting in a structural modification to the polynucleotide.

[0037] Provided are modified nucleic acids containing a translatable region and one, two, or more than two different nucleoside modifications. In some embodiments, the modified nucleic acid exhibits reduced degradation in a cell into which the nucleic acid is introduced, relative to a corresponding unmodified nucleic acid.

[0038] In some embodiments, the chemical modifications can be located on the sugar moiety of the nucleotide

[0039] In some embodiments, the chemical modifications can be located on the phosphate backbone of the nucleotide

[0040] In certain embodiments it is desirable to intracellularly degrade a modified nucleic acid introduced into the cell, for example if precise timing of protein production is desired. Thus, the invention provides a modified nucleic acid containing a degradation domain, which is capable of being acted on in a directed manner within a cell.

Polynucleotide, Primary Construct or mmRNA Architecture

[0041] The polynucleotides of the present invention are distinguished from wild type mRNA in their functional and/or structural design features which serve to, as evidenced herein, overcome existing problems of effective polypeptide production using nucleic acid-based therapeutics.

[0042] FIG. 1 shows a representative primary construct 100 of the present invention. As used herein, the term “primary construct” or “primary mRNA construct” refers to polynucleotide transcript which encodes one or more polypeptides of interest and which retains sufficient structural and/or chemical features to allow the polypeptide of interest encoded therein to be translated. Primary constructs may be polynucleotides of the invention. When structurally or chemically modified, the primary construct may be referred to as a mmRNA.

[0043] Returning to FIG. 1, the primary construct 100 here contains a first region of linked nucleotides 102 that is flanked by a first flanking region 104 and a second flaking region 106. As used herein, the “first region” may be referred to as a “coding region” or “region encoding” or simply the “first region.” This first region may include, but is not limited to, the encoded polypeptide of interest. The polypeptide of interest may comprise at its 5′ terminus one or more signal peptide sequences encoded by a signal peptide sequence region 103. The flanking region 104 may comprise a region of linked nucleotides comprising one or more complete or incomplete 5′ UTRs sequences. The flanking region 104 may also comprise a 5′ terminal cap 108. The second flanking region 106 may comprise a region of linked nucleotides comprising one or more complete or incomplete 3′ UTRs. The flanking region 106 may also comprise a 3′ tailing sequence 110 and a 3′UTR 120.

[0044] Bridging the 5′ terminus of the first region 102 and the first flanking region 104 is a first operational region 105. Traditionally this operational region comprises a start codon. The operational region may alternatively comprise any translation initiation sequence or signal including a start codon.

[0045] Bridging the 3′ terminus of the first region 102 and the second flanking region 106 is a second operational region 107. Traditionally this operational region comprises a stop codon. The operational region may alternatively comprise any translation initiation sequence or signal including a stop codon. According to the present invention, multiple serial stop codons may also be used. In one embodiment, the operation region of the present invention may comprise two stop codons. The first stop codon may be “TGA” and the second stop codon may be selected from the group consisting of “TAA,” “TGA” and “TAG.”

[0046] Turning to FIG. 2, the 3′UTR 120 of the second flanking region 106 may comprise one or more sensor sequences 130. These sensor sequences as discussed herein operate as pseudo-receptors (or binding sites) for ligands of the local microenvironment of the primary construct or polynucleotide. For example, microRNA bindng sites or miRNA seeds may be used as sensors such that they function as pseudoreceptors for any microRNAs present in the environment of the polynucleotide.

[0047] Generally, the shortest length of the first region of the primary construct of the present invention can be the length of a nucleic acid sequence that is sufficient to encode for a dipeptide, a tripeptide, a tetrapeptide, a pentapeptide, a hexapeptide, a heptapeptide, an octapeptide, a nonapeptide, or a decapeptide. In another embodiment, the length may be sufficient to encode a peptide of 2-30 amino acids, e.g. 5-30, 10-30, 2-25, 5-25, 10-25, or 10-20 amino acids. The length may be sufficient to encode for a peptide of at least 11, 12, 13, 14, 15, 17, 20, 25 or 30 amino acids, or a peptide that is no longer than 40 amino acids, e.g. no longer than 35, 30, 25, 20, 17, 15, 14, 13, 12, 11 or 10 amino acids. Examples of dipeptides that the polynucleotide sequences can encode or include, but are not limited to, carnosine and anserine.

[0048] Generally, the length of the first region encoding the polypeptide of interest of the present invention is greater than about 30 nucleotides in length (e.g., at least or greater than about 35, 40, 45, 50, 55, 60, 70, 80, 90, 100, 120, 140, 160, 180, 200, 250, 300, 350, 400, 450, 500, 600, 700, 800, 900, 1,000, 1,100, 1,200, 1,300, 1,400, 1,500, 1,600, 1,700, 1,800, 1,900, 2,000, 2,500, and 3,000, 4,000, 5,000, 6,000, 7,000, 8,000, 9,000, 10,000, 20,000, 30,000, 40,000, 50,000, 60,000, 70,000, 80,000, 90,000 or up to and including 100,000 nucleotides). As used herein, the “first region” may be referred to as a “coding region” or “region encoding” or simply the “first region.”

[0049] In some embodiments, the polynucleotide polynucleotide, primary construct, or mmRNA includes from about 30 to about 100,000 nucleotides (e.g., from 30 to 50, from 30 to 100, from 30 to 250, from 30 to 500, from 30 to 1,000, from 30 to 1,500, from 30 to 3,000, from 30 to 5,000, from 30 to 7,000, from 30 to 10,000, from 30 to 25,000, from 30 to 50,000, from 30 to 70,000, from 100 to 250, from 100 to 500, from 100 to 1,000, from 100 to 1,500, from 100 to 3,000, from 100 to 5,000, from 100 to 7,000, from 100 to 10,000, from 100 to 25,000, from 100 to 50,000, from 100 to 70,000, from 100 to 100,000, from 500 to 1,000, from 500 to 1,500, from 500 to 2,000, from 500 to 3,000, from 500 to 5,000, from 500 to 7,000, from 500 to 10,000, from 500 to 25,000, from 500 to 50,000, from 500 to 70,000, from 500 to 100,000, from 1,000 to 1,500, from 1,000 to 2,000, from 1,000 to 3,000, from 1,000 to 5,000, from 1,000 to 7,000, from 1,000 to 10,000, from 1,000 to 25,000, from 1,000 to 50,000, from 1,000 to 70,000, from 1,000 to 100,000, from 1,500 to 3,000, from 1,500 to 5,000, from 1,500 to 7,000, from 1,500 to 10,000, from 1,500 to 25,000, from 1,500 to 50,000, from 1,500 to 70,000, from 1,500 to 100,000, from 2,000 to 3,000, from 2,000 to 5,000, from 2,000 to 7,000, from 2,000 to 10,000, from 2,000 to 25,000, from 2,000 to 50,000, from 2,000 to 70,000, and from 2,000 to 100,000).

[0050] According to the present invention, the first and second flanking regions may range independently from 15-1,000 nucleotides in length (e.g., greater than 30, 40, 45, 50, 55, 60, 70, 80, 90, 100, 120, 140, 160, 180, 200, 250, 300, 350, 400, 450, 500, 600, 700, 800, and 900 nucleotides or at least 30, 40, 45, 50, 55, 60, 70, 80, 90, 100, 120, 140, 160, 180, 200, 250, 300, 350, 400, 450, 500, 600, 700, 800, 900, and 1,000 nucleotides).

[0051] According to the present invention, the tailing sequence may range from absent to 500 nucleotides in length (e.g., at least 60, 70, 80, 90, 120, 140, 160, 180, 200, 250, 300, 350, 400, 450, or 500 nucleotides). Where the tailing region is a polyA tail, the length may be determined in units of or as a function of polyA binding protein binding. In this embodiment, the polyA tail is long enough to bind at least 4 monomers of polyA binding protein. PolyA binding protein monomers bind to stretches of approximately 38 nucleotides. As such, it has been observed that polyA tails of about 80 nucleotides and 160 nucleotides are functional.

[0052] According to the present invention, the capping region may comprise a single cap or a series of nucleotides forming the cap. In this embodiment the capping region may be from 1 to 10, e.g. 2-9, 3-8, 4-7, 1-5, 5-10, or at least 2, or 10 or fewer nucleotides in length. In some embodiments, the cap is absent.

[0053] According to the present invention, the first and second operational regions may range from 3 to 40, e.g., 5-30, 10-20, 15, or at least 4, or 30 or fewer nucleotides in length and may comprise, in addition to a start and/or stop codon, one or more signal and/or restriction sequences.

### Cyclic Polynucleotides

[0054] According to the present invention, a nucleic acid, modified RNA or primary construct may be cyclized, or concatemerized, to generate a translation competent molecule to assist interactions between poly-A binding proteins and 5′-end binding proteins. The mechanism of cyclization or concatemerization may occur through at least 3 different routes: 1) chemical, 2) enzymatic, and 3) ribozyme catalyzed. The newly formed 5′-/3′-linkage may be intramolecular or intermolecular.

[0055] In the first route, the 5′-end and the 3′-end of the nucleic acid contain chemically reactive groups that, when close together, form a new covalent linkage between the 5′-end and the 3′-end of the molecule. The 5′-end may contain an NHS-ester reactive group and the 3′-end may contain a 3′-amino-terminated nucleotide such that in an organic solvent the 3′-amino-terminated nucleotide on the 3′-end of a synthetic mRNA molecule will undergo a nucleophilic attack on the 5′-NHS-ester moiety forming a new 5′-/3′-amide bond.

[0056] In the second route, T4 RNA ligase may be used to enzymatically link a 5′-phosphorylated nucleic acid molecule to the 3′-hydroxyl group of a nucleic acid forming a new phosphorodiester linkage. In an example reaction, 1 μg of a nucleic acid molecule is incubated at 37° C. for 1 hour with 1-10 units of T4 RNA ligase (New England Biolabs, Ipswich, Mass.) according to the manufacturer's protocol. The ligation reaction may occur in the presence of a split oligonucleotide capable of base-pairing with both the 5′- and 3′-region in juxtaposition to assist the enzymatic ligation reaction.

[0057] In the third route, either the 5′- or 3′-end of the cDNA template encodes a ligase ribozyme sequence such that during in vitro transcription, the resultant nucleic acid molecule can contain an active ribozyme sequence capable of ligating the 5′-end of a nucleic acid molecule to the 3′-end of a nucleic acid molecule. The ligase ribozyme may be derived from the Group I Intron, Group I Intron, Hepatitis Delta Virus, Hairpin ribozyme or may be selected by SELEX (systematic evolution of ligands by exponential enrichment). The ribozyme ligase reaction may take 1 to 24 hours at temperatures between 0 and 37° C.

### Polynucleotide Multimers

[0058] According to the present invention, multiple distinct nucleic acids, modified RNA or primary constructs may be linked together through the 3′-end using nucleotides which are modified at the 3′-terminus. Chemical conjugation may be used to control the stoichiometry of delivery into cells. For example, the glyoxylate cycle enzymes, isocitrate lyase and malate synthase, may be supplied into HepG2 cells at a 1:1 ratio to alter cellular fatty acid metabolism. This ratio may be controlled by chemically linking nucleic acids or modified RNA using a 3′-azido terminated nucleotide on one nucleic acids or modified RNA species and a C5-ethynyl or alkynyl-containing nucleotide on the opposite nucleic acids or modified RNA species. The modified nucleotide is added post-transcriptionally using terminal transferase (New England Biolabs, Ipswich, Mass.) according to the manufacturer's protocol. After the addition of the 3′-modified nucleotide, the two nucleic acids or modified RNA species may be combined in an aqueous solution, in the presence or absence of copper, to form a new covalent linkage via a click chemistry mechanism as described in the literature.

[0059] In another example, more than two polynucleotides may be linked together using a functionalized linker molecule. For example, a functionalized saccharide molecule may be chemically modified to contain multiple chemical reactive groups (SH—, NH₂—, N₃, etc. . . . ) to react with the cognate moiety on a 3′-functionalized mRNA molecule (i.e., a 3′-maleimide ester, 3′-NHS-ester, alkynyl). The number of reactive groups on the modified saccharide can be controlled in a stoichiometric fashion to directly control the stoichiometric ratio of conjugated nucleic acid or mRNA.

### Modified RNA Conjugates and Combinations

[0060] In order to further enhance protein production, nucleic acids, modified RNA, polynucleotides or primary constructs of the present invention can be designed to be conjugated to other polynucleotides, dyes, intercalating agents (e.g. acridines), cross-linkers (e.g. psoralene, mitomycin C), porphyrins (TPPC4, texaphyrin, Sapphyrin), polycyclic aromatic hydrocarbons (e.g., phenazine, dihydrophenazine), artificial endonucleases (e.g. EDTA), alkylating agents, phosphate, amino, mercapto, PEG (e.g., PEG-40K), MPEG, [MPEG]₂, polyamino, alkyl, substituted alkyl, radiolabeled markers, enzymes, haptens (e.g. biotin), transport/absorption facilitators (e.g., aspirin, vitamin E, folic acid), synthetic ribonucleases, proteins, e.g., glycoproteins, or peptides, e.g., molecules having a specific affinity for a co-ligand, or antibodies e.g., an antibody, that binds to a specified cell type such as a cancer cell, endothelial cell, or bone cell, hormones and hormone receptors, non-peptidic species, such as lipids, lectins, carbohydrates, vitamins, cofactors, or a drug.

[0061] Conjugation may result in increased stability and/or half life and may be particularly useful in targeting the nucleic acids, modified RNA, polynucleotides or primary constructs to specific sites in the cell, tissue or organism.

[0062] According to the present invention, the nucleic acids, modified RNA or primary construct may be administered with, or further encode one or more of RNAi agents, siRNAs, shRNAs, miRNAs, miRNA binding sites, antisense RNAs, ribozymes, catalytic DNA, tRNA, RNAs that induce triple helix formation, aptamers or vectors, and the like.

### Bifunctional Polynucleotides

[0063] In one embodiment of the invention are bifunctional polynucleotides (e.g., bifunctional nucleic acids, bifunctional modified RNA or bifunctional primary constructs). As the name implies, bifunctional polynucleotides are those having or capable of at least two functions. These molecules may also by convention be referred to as multi-functional.

[0064] The multiple functionalities of bifunctional polynucleotides may be encoded by the RNA (the function may not manifest until the encoded product is translated) or may be a property of the polynucleotide itself. It may be structural or chemical. Bifunctional modified polynucleotides may comprise a function that is covalently or electrostatically associated with the polynucleotides. Further, the two functions may be provided in the context of a complex of a modified RNA and another molecule.

[0065] Bifunctional polynucleotides may encode peptides which are anti-proliferative. These peptides may be linear, cyclic, constrained or random coil. They may function as aptamers, signaling molecules, ligands or mimics or mimetics thereof. Anti-proliferative peptides may, as translated, be from 3 to 50 amino acids in length. They may be 5-40, 10-30, or approximately 15 amino acids long. They may be single chain, multichain or branched and may form complexes, aggregates or any multi-unit structure once translated.

### Noncoding Polynucleotides

[0066] As described herein, provided are nucleic acids, modified RNA, polynucleotides and primary constructs having sequences that are partially or substantially not translatable, e.g., having a noncoding region. Such molecules are generally not translated, but can exert an effect on protein production by one or more of binding to and sequestering one or more translational machinery components such as a ribosomal protein or a transfer RNA (tRNA), thereby effectively reducing protein expression in the cell or modulating one or more pathways or cascades in a cell which in turn alters protein levels. The nucleic acids, polynucleotides, primary constructs or mRNA may contain or encode one or more long noncoding RNA (lncRNA, or lincRNA) or portion thereof, a small nucleolar RNA (sno-RNA), micro RNA (miRNA), small interfering RNA (siRNA) or Piwi-interacting RNA (piRNA).

### Polypeptides of Interest

[0067] According to the present invention, the primary construct is designed to encode one or more polypeptides of interest or fragments thereof. A polypeptide of interest may include, but is not limited to, whole polypeptides, a plurality of polypeptides or fragments of polypeptides, which independently may be encoded by one or more nucleic acids, a plurality of nucleic acids, fragments of nucleic acids or variants of any of the aforementioned. As used herein, the term “polypeptides of interest” refers to any polypeptide which is selected to be encoded in the primary construct of the present invention. As used herein, “polypeptide” means a polymer of amino acid residues (natural or unnatural) linked together most often by peptide bonds. The term, as used herein, refers to proteins, polypeptides, and peptides of any size, structure, or function. In some instances the polypeptide encoded is smaller than about 50 amino acids and the polypeptide is then termed a peptide. If the polypeptide is a peptide, it will be at least about 2, 3, 4, or at least 5 amino acid residues long. Thus, polypeptides include gene products, naturally occurring polypeptides, synthetic polypeptides, homologs, orthologs, paralogs, fragments and other equivalents, variants, and analogs of the foregoing. A polypeptide may be a single molecule or may be a multi-molecular complex such as a dimer, trimer or tetramer. They may also comprise single chain or multichain polypeptides such as antibodies or insulin and may be associated or linked. Most commonly disulfide linkages are found in multichain polypeptides. The term polypeptide may also apply to amino acid polymers in which one or more amino acid residues are an artificial chemical analogue of a corresponding naturally occurring amino acid.

[0068] The term “polypeptide variant” refers to molecules which differ in their amino acid sequence from a native or reference sequence. The amino acid sequence variants may possess substitutions, deletions, and/or insertions at certain positions within the amino acid sequence, as compared to a native or reference sequence. Ordinarily, variants will possess at least about 50% identity (homology) to a native or reference sequence, and preferably, they will be at least about 80%, more preferably at least about 90% identical (homologous) to a native or reference sequence.

[0069] In some embodiments “variant mimics” are provided. As used herein, the term “variant mimic” is one which contains one or more amino acids which would mimic an activated sequence. For example, glutamate may serve as a mimic for phosphoro-threonine and/or phosphoro-serine. Alternatively, variant mimics may result in deactivation or in an inactivated product containing the mimic, e.g., phenylalanine may act as an inactivating substitution for tyrosine; or alanine may act as an inactivating substitution for serine.

[0070] “Homology” as it applies to amino acid sequences is defined as the percentage of residues in the candidate amino acid sequence that are identical with the residues in the amino acid sequence of a second sequence after aligning the sequences and introducing gaps, if necessary, to achieve the maximum percent homology. Methods and computer programs for the alignment are well known in the art. It is understood that homology depends on a calculation of percent identity but may differ in value due to gaps and penalties introduced in the calculation.

[0071] By “homologs” as it applies to polypeptide sequences means the corresponding sequence of other species having substantial identity to a second sequence of a second species.

[0072] “Analogs” is meant to include polypeptide variants which differ by one or more amino acid alterations, e.g., substitutions, additions or deletions of amino acid residues that still maintain one or more of the properties of the parent or starting polypeptide.

[0073] The present invention contemplates several types of compositions which are polypeptide based including variants and derivatives. These include substitutional, insertional, deletion and covalent variants and derivatives. The term “derivative” is used synonymously with the term “variant” but generally refers to a molecule that has been modified and/or changed in any way relative to a reference molecule or starting molecule.

[0074] As such, polynucleotides encoding polypeptides of interest containing substitutions, insertions and/or additions, deletions and covalent modifications with respect to reference sequences are included within the scope of this invention. For example, sequence tags or amino acids, such as one or more lysines, can be added to the peptide sequences of the invention (e.g., at the N-terminal or C-terminal ends). Sequence tags can be used for peptide purification or localization. Lysines can be used to increase peptide solubility or to allow for biotinylation. Alternatively, amino acid residues located at the carboxy and amino terminal regions of the amino acid sequence of a peptide or protein may optionally be deleted providing for truncated sequences. Certain amino acids (e.g., C-terminal or N-terminal residues) may alternatively be deleted depending on the use of the sequence, as for example, expression of the sequence as part of a larger sequence which is soluble, or linked to a solid support.

[0075] “Substitutional variants” when referring to polypeptides are those that have at least one amino acid residue in a native or starting sequence removed and a different amino acid inserted in its place at the same position. The substitutions may be single, where only one amino acid in the molecule has been substituted, or they may be multiple, where two or more amino acids have been substituted in the same molecule.

[0076] As used herein the term “conservative amino acid substitution” refers to the substitution of an amino acid that is normally present in the sequence with a different amino acid of similar size, charge, or polarity. Examples of conservative substitutions include the substitution of a non-polar (hydrophobic) residue such as isoleucine, valine and leucine for another non-polar residue. Likewise, examples of conservative substitutions include the substitution of one polar (hydrophilic) residue for another such as between arginine and lysine, between glutamine and asparagine, and between glycine and serine. Additionally, the substitution of a basic residue such as lysine, arginine or histidine for another, or the substitution of one acidic residue such as aspartic acid or glutamic acid for another acidic residue are additional examples of conservative substitutions. Examples of non-conservative substitutions include the substitution of a non-polar (hydrophobic) amino acid residue such as isoleucine, valine, leucine, alanine, methionine for a polar (hydrophilic) residue such as cysteine, glutamine, glutamic acid or lysine and/or a polar residue for a non-polar residue.

[0077] “Insertional variants” when referring to polypeptides are those with one or more amino acids inserted immediately adjacent to an amino acid at a particular position in a native or starting sequence. “Immediately adjacent” to an amino acid means connected to either the alpha-carboxy or alpha-amino functional group of the amino acid.

[0078] “Deletional variants” when referring to polypeptides are those with one or more amino acids in the native or starting amino acid sequence removed. Ordinarily, deletional variants will have one or more amino acids deleted in a particular region of the molecule.

[0079] “Covalent derivatives” when referring to polypeptides include modifications of a native or starting protein with an organic proteinaceous or non-proteinaceous derivatizing agent, and/or post-translational modifications. Covalent modifications are traditionally introduced by reacting targeted amino acid residues of the protein with an organic derivatizing agent that is capable of reacting with selected side-chains or terminal residues, or by harnessing mechanisms of post-translational modifications that function in selected recombinant host cells. The resultant covalent derivatives are useful in programs directed at identifying residues important for biological activity, for immunoassays, or for the preparation of anti-protein antibodies for immunoaffinity purification of the recombinant glycoprotein. Such modifications are within the ordinary skill in the art and are performed without undue experimentation.

[0080] Certain post-translational modifications are the result of the action of recombinant host cells on the expressed polypeptide. Glutaminyl and asparaginyl residues are frequently post-translationally deamidated to the corresponding glutamyl and aspartyl residues. Alternatively, these residues are deamidated under mildly acidic conditions. Either form of these residues may be present in the polypeptides produced in accordance with the present invention.

[0081] Other post-translational modifications include hydroxylation of proline and lysine, phosphorylation of hydroxyl groups of seryl or threonyl residues, methylation of the alpha-amino groups of lysine, arginine, and histidine side chains (T. E. Creighton, Proteins: Structure and Molecular Properties, W.H. Freeman & Co., San Francisco, pp. 79-86 (1983)).

[0082] “Features” when referring to polypeptides are defined as distinct amino acid sequence-based components of a molecule. Features of the polypeptides encoded by the mmRNA of the present invention include surface manifestations, local conformational shape, folds, loops, half-loops, domains, half-domains, sites, termini or any combination thereof.

[0083] As used herein when referring to polypeptides the term “surface manifestation” refers to a polypeptide based component of a protein appearing on an outermost surface.

[0084] As used herein when referring to polypeptides the term “local conformational shape” means a polypeptide based structural manifestation of a protein which is located within a definable space of the protein.

[0085] As used herein when referring to polypeptides the term “fold” refers to the resultant conformation of an amino acid sequence upon energy minimization. A fold may occur at the secondary or tertiary level of the folding process. Examples of secondary level folds include beta sheets and alpha helices. Examples of tertiary folds include domains and regions formed due to aggregation or separation of energetic forces. Regions formed in this way include hydrophobic and hydrophilic pockets, and the like.

[0086] As used herein the term “turn” as it relates to protein conformation means a bend which alters the direction of the backbone of a peptide or polypeptide and may involve one, two, three or more amino acid residues.

[0087] As used herein when referring to polypeptides the term “loop” refers to a structural feature of a polypeptide which may serve to reverse the direction of the backbone of a peptide or polypeptide. Where the loop is found in a polypeptide and only alters the direction of the backbone, it may comprise four or more amino acid residues. Oliva et al. have identified at least 5 classes of protein loops (J. Mol Biol 266 (4): 814-830; 1997). Loops may be open or closed. Closed loops or “cyclic” loops may comprise 2, 3, 4, 5, 6, 7, 8, 9, 10 or more amino acids between the bridging moieties. Such bridging moieties may comprise a cysteine-cysteine bridge (Cys-Cys) typical in polypeptides having disulfide bridges or alternatively bridging moieties may be non-protein based such as the dibromozylyl agents used herein.

[0088] As used herein when referring to polypeptides the term “half-loop” refers to a portion of an identified loop having at least half the number of amino acid resides as the loop from which it is derived. It is understood that loops may not always contain an even number of amino acid residues. Therefore, in those cases where a loop contains or is identified to comprise an odd number of amino acids, a half-loop of the odd-numbered loop will comprise the whole number portion or next whole number portion of the loop (number of amino acids of the loop/2+/−0.5 amino acids). For example, a loop identified as a 7 amino acid loop could produce half-loops of 3 amino acids or 4 amino acids (7/2=3.5+/−0.5 being 3 or 4).

[0089] As used herein when referring to polypeptides the term “domain” refers to a motif of a polypeptide having one or more identifiable structural or functional characteristics or properties (e.g., binding capacity, serving as a site for protein-protein interactions).

[0090] As used herein when referring to polypeptides the term “half-domain” means a portion of an identified domain having at least half the number of amino acid resides as the domain from which it is derived. It is understood that domains may not always contain an even number of amino acid residues. Therefore, in those cases where a domain contains or is identified to comprise an odd number of amino acids, a half-domain of the odd-numbered domain will comprise the whole number portion or next whole number portion of the domain (number of amino acids of the domain/2+/−0.5 amino acids). For example, a domain identified as a 7 amino acid domain could produce half-domains of 3 amino acids or 4 amino acids (7/2=3.5+/−0.5 being 3 or 4). It is also understood that subdomains may be identified within domains or half-domains, these subdomains possessing less than all of the structural or functional properties identified in the domains or half domains from which they were derived. It is also understood that the amino acids that comprise any of the domain types herein need not be contiguous along the backbone of the polypeptide (i.e., nonadjacent amino acids may fold structurally to produce a domain, half-domain or subdomain).

[0091] As used herein when referring to polypeptides the terms “site” as it pertains to amino acid based embodiments is used synonymously with “amino acid residue” and “amino acid side chain.” A site represents a position within a peptide or polypeptide that may be modified, manipulated, altered, derivatized or varied within the polypeptide based molecules of the present invention.

[0092] As used herein the terms “termini” or “terminus” when referring to polypeptides refers to an extremity of a peptide or polypeptide. Such extremity is not limited only to the first or final site of the peptide or polypeptide but may include additional amino acids in the terminal regions. The polypeptide based molecules of the present invention may be characterized as having both an N-terminus (terminated by an amino acid with a free amino group (NH2)) and a C-terminus (terminated by an amino acid with a free carboxyl group (COOH)). Proteins of the invention are in some cases made up of multiple polypeptide chains brought together by disulfide bonds or by non-covalent forces (multimers, oligomers). These sorts of proteins will have multiple N- and C-termini. Alternatively, the termini of the polypeptides may be modified such that they begin or end, as the case may be, with a non-polypeptide based moiety such as an organic conjugate.

[0093] Once any of the features have been identified or defined as a desired component of a polypeptide to be encoded by the primary construct or mmRNA of the invention, any of several manipulations and/or modifications of these features may be performed by moving, swapping, inverting, deleting, randomizing or duplicating. Furthermore, it is understood that manipulation of features may result in the same outcome as a modification to the molecules of the invention. For example, a manipulation which involved deleting a domain would result in the alteration of the length of a molecule just as modification of a nucleic acid to encode less than a full length molecule would.

[0094] Modifications and manipulations can be accomplished by methods known in the art such as, but not limited to, site directed mutagenesis. The resulting modified molecules may then be tested for activity using in vitro or in vivo assays such as those described herein or any other suitable screening assay known in the art.

[0095] According to the present invention, the polypeptides may comprise a consensus sequence which is discovered through rounds of experimentation. As used herein a “consensus” sequence is a single sequence which represents a collective population of sequences allowing for variability at one or more sites.

[0096] As recognized by those skilled in the art, protein fragments, functional protein domains, and homologous proteins are also considered to be within the scope of polypeptides of interest of this invention. For example, provided herein is any protein fragment (meaning an polypeptide sequence at least one amino acid residue shorter than a reference polypeptide sequence but otherwise identical) of a reference protein 10, 20, 30, 40, 50, 60, 70, 80, 90, 100 or greater than 100 amino acids in length. In another example, any protein that includes a stretch of about 20, about 30, about 40, about 50, or about 100 amino acids which are about 40%, about 50%, about 60%, about 70%, about 80%, about 90%, about 95%, or about 100% identical to any of the sequences described herein can be utilized in accordance with the invention. In certain embodiments, a polypeptide to be utilized in accordance with the invention includes 2, 3, 4, 5, 6, 7, 8, 9, 10, or more mutations as shown in any of the sequences provided or referenced herein.

### Encoded Polypeptides of Interest

[0097] The primary constructs, modified nucleic acids or mmRNA of the present invention may be designed to encode polypeptides of interest such as peptides and proteins.

[0098] In one embodiment, primary constructs, modified nucleic acids or mmRNA of the present invention may encode variant polypeptides which have a certain identity with a reference polypeptide sequence. As used herein, a “reference polypeptide sequence” refers to a starting polypeptide sequence. Reference sequences may be wild type sequences or any sequence to which reference is made in the design of another sequence. A “reference polypeptide sequence” may, e.g., be any one of the protein sequence listed in U.S. Provisional Patent Application No. 61/618,862, filed Apr. 2, 2012, entitled Modified Polynucleotides for the Production of Biologics; U.S. Provisional Patent Application No. 61/681,645, filed Aug. 10, 2012, entitled Modified Polynucleotides for the Production of Biologics; U.S. Provisional Patent Application No. 61/737,130, filed Dec. 14, 2012, entitled Modified Polynucleotides for the Production of Biologics; U.S. Provisional Patent Application No. 61/618,866, filed Apr. 2, 2012, entitled Modified Polynucleotides for the Production of Antibodies; U.S. Provisional Patent Application No. 61/681,647, filed Aug. 10, 2012, entitled Modified Polynucleotides for the Production of Antibodies; U.S. Provisional Patent Application No. 61/737,134, filed Dec. 14, 2012, entitled Modified Polynucleotides for the Production of Antibodies; U.S. Provisional Patent Application No. 61/618,868, filed Apr. 2, 2012, entitled Modified Polynucleotides for the Production of Vaccines; U.S. Provisional Patent Application No. 61/681,648, filed Aug. 10, 2012, entitled Modified Polynucleotides for the Production of Vaccines; U.S. Provisional Patent Application No. 61/737,135, filed Dec. 14, 2012, entitled Modified Polynucleotides for the Production of Vaccines; U.S. Provisional Patent Application No. 61/618,870, filed Apr. 2, 2012, entitled Modified Polynucleotides for the Production of Therapeutic Proteins and Peptides; U.S. Provisional Patent Application No. 61/681,649, filed Aug. 10, 2012, entitled Modified Polynucleotides for the Production of Therapeutic Proteins and Peptides; U.S. Provisional Patent Application No. 61/737,139, filed Dec. 14, 2012, Modified Polynucleotides for the Production of Therapeutic Proteins and Peptides; U.S. Provisional Patent Application No. 61/618,873, filed Apr. 2, 2012, entitled Modified Polynucleotides for the Production of Secreted Proteins; U.S. Provisional Patent Application No. 61/681,650, filed Aug. 10, 2012, entitled Modified Polynucleotides for the Production of Secreted Proteins; U.S. Provisional Patent Application No. 61/737,147, filed Dec. 14, 2012, entitled Modified Polynucleotides for the Production of Secreted Proteins; U.S. Provisional Patent Application No. 61/618,878, filed Apr. 2, 2012, entitled Modified Polynucleotides for the Production of Plasma Membrane Proteins; U.S. Provisional Patent Application No. 61/681,654, filed Aug. 10, 2012, entitled Modified Polynucleotides for the Production of Plasma Membrane Proteins; U.S. Provisional Patent Application No. 61/737,152, filed Dec. 14, 2012, entitled Modified Polynucleotides for the Production of Plasma Membrane Proteins; U.S. Provisional Patent Application No. 61/618,885, filed Apr. 2, 2012, entitled Modified Polynucleotides for the Production of Cytoplasmic and Cytoskeletal Proteins; U.S. Provisional Patent Application No. 61/681,658, filed Aug. 10, 2012, entitled Modified Polynucleotides for the Production of Cytoplasmic and Cytoskeletal Proteins; U.S. Provisional Patent Application No. 61/737,155, filed Dec. 14, 2012, entitled Modified Polynucleotides for the Production of Cytoplasmic and Cytoskeletal Proteins; U.S. Provisional Patent Application No. 61/618,896, filed Apr. 2, 2012, entitled Modified Polynucleotides for the Production of Intracellular Membrane Bound Proteins; U.S. Provisional Patent Application No. 61/668,157, filed Jul. 5, 2012, entitled Modified Polynucleotides for the Production of Intracellular Membrane Bound Proteins; U.S. Provisional Patent Application No. 61/681,661, filed Aug. 10, 2012, entitled Modified Polynucleotides for the Production of Intracellular Membrane Bound Proteins; U.S. Provisional Patent Application No. 61/737,160, filed Dec. 14, 2012, entitled Modified Polynucleotides for the Production of Intracellular Membrane Bound Proteins; U.S. Provisional Patent Application No. 61/618,911, filed Apr. 2, 2012, entitled Modified Polynucleotides for the Production of Nuclear Proteins; U.S. Provisional Patent Application No. 61/681,667, filed Aug. 10, 2012, entitled Modified Polynucleotides for the Production of Nuclear Proteins; U.S. Provisional Patent Application No. 61/737,168, filed Dec. 14, 2012, entitled Modified Polynucleotides for the Production of Nuclear Proteins; U.S. Provisional Patent Application No. 61/618,922, filed Apr. 2, 2012, entitled Modified Polynucleotides for the Production of Proteins; U.S. Provisional Patent Application No. 61/681,675, filed Aug. 10, 2012, entitled Modified Polynucleotides for the Production of Proteins; U.S. Provisional Patent Application No. 61/737,174, filed Dec. 14, 2012, entitled Modified Polynucleotides for the Production of Proteins; U.S. Provisional Patent Application No. 61/618,935, filed Apr. 2, 2012, entitled Modified Polynucleotides for the Production of Proteins Associated with Human Disease; U.S. Provisional Patent Application No. 61/681,687, filed Aug. 10, 2012, entitled Modified Polynucleotides for the Production of Proteins Associated with Human Disease; U.S. Provisional Patent Application No. 61/737,184, filed Dec. 14, 2012, entitled Modified Polynucleotides for the Production of Proteins Associated with Human Disease; U.S. Provisional Patent Application No. 61/618,945, filed Apr. 2, 2012, entitled Modified Polynucleotides for the Production of Proteins Associated with Human Disease; U.S. Provisional Patent Application No. 61/681,696, filed Aug. 10, 2012, entitled Modified Polynucleotides for the Production of Proteins Associated with Human Disease; U.S. Provisional Patent Application No. 61/737,191, filed Dec. 14, 2012, entitled Modified Polynucleotides for the Production of Proteins Associated with Human Disease; U.S. Provisional Patent Application No. 61/618,953, filed Apr. 2, 2012, entitled Modified Polynucleotides for the Production of Proteins Associated with Human Disease; U.S. Provisional Patent Application No. 61/681,704, filed Aug. 10, 2012, entitled Modified Polynucleotides for the Production of Proteins Associated with Human Disease; U.S. Provisional Patent Application No. 61/737,203, filed Dec. 14, 2012, entitled Modified Polynucleotides for the Production of Proteins Associated with Human Disease; U.S. Provisional Patent Application No. 61/681,720, filed Aug. 10, 2012, entitled Modified Polynucleotides for the Production of Cosmetic Proteins and Peptides; U.S. Provisional Patent Application No. 61/737,213, filed Dec. 14, 2012, entitled Modified Polynucleotides for the Production of Cosmetic Proteins and Peptides; U.S. Provisional Patent Application No. 61/681,742, filed Aug. 10, 2012, entitled Modified Polynucleotides for the Production of Oncology-Related Proteins and Peptides; International Application No PCT/US2013/030062, filed Mar. 9, 2013, entitled Modified Polynucleotides for the Production of Biologics and Proteins Associated with Human Disease; U.S. patent application Ser. No. 13/791,922, filed Mar. 9, 2013, entitled Modified Polynucleotides for the Production of Biologics and Proteins Associated with Human Disease; International Application No PCT/US2013/030063, filed Mar. 9, 2013, entitled Modified Polynucleotides; International Application No. PCT/US2013/030064, entitled Modified Polynucleotides for the Production of Secreted Proteins; U.S. patent application Ser. No. 13/791,921, filed Mar. 9, 2013, entitled Modified Polynucleotides for the Production of Secreted Proteins; International Application No PCT/US2013/030059, filed Mar. 9, 2013, entitled Modified Polynucleotides for the Production of Membrane Proteins; International Application No. PCT/US2013/030066, filed Mar. 9, 2013, entitled Modified Polynucleotides for the Production of Cytoplasmic and Cytoskeletal Proteins; International Application No. PCT/US2013/030067, filed Mar. 9, 2013, entitled Modified Polynucleotides for the Production of Nuclear Proteins; International Application No. PCT/US2013/030060, filed Mar. 9, 2013, entitled Modified Polynucleotides for the Production of Proteins; International Application No. PCT/US2013/030061, filed Mar. 9, 2013, entitled Modified Polynucleotides for the Production of Proteins Associated with Human Disease; U.S. patent application Ser. No. 13/791,910, filed Mar. 9, 2013, entitled Modified Polynucleotides for the Production of Proteins Associated with Human Disease; International Application No. PCT/US2013/030068, filed Mar. 9, 2013, entitled Modified Polynucleotides for the Production of Cosmetic Proteins and Peptides; and International Application No. PCT/US2013/030070, filed Mar. 9, 2013, entitled Modified Polynucleotides for the Production of Oncology-Related Proteins and Peptides; International Patent Application No. PCT/US2013/031821, filed Mar. 15, 2013, entitled In Vivo Production of Proteins; the contents of each of which are herein incorporated by reference in their entireties.

[0099] The term “identity” as known in the art, refers to a relationship between the sequences of two or more peptides, as determined by comparing the sequences. In the art, identity also means the degree of sequence relatedness between peptides, as determined by the number of matches between strings of two or more amino acid residues. Identity measures the percent of identical matches between the smaller of two or more sequences with gap alignments (if any) addressed by a particular mathematical model or computer program (i.e., “algorithms”). Identity of related peptides can be readily calculated by known methods. Such methods include, but are not limited to, those described in Computational Molecular Biology, Lesk, A. M., ed., Oxford University Press, New York, 1988; Biocomputing: Informatics and Genome Projects, Smith, D. W., ed., Academic Press, New York, 1993; Computer Analysis of Sequence Data, Part 1, Griffin, A. M., and Griffin, H. G., eds., Humana Press, New Jersey, 1994; Sequence Analysis in Molecular Biology, von Heinje, G., Academic Press, 1987; Sequence Analysis Primer, Gribskov, M. and Devereux, J., eds., M. Stockton Press, New York, 1991; and Carillo et al., SIAM J. Applied Math. 48, 1073 (1988).

[0100] In some embodiments, the polypeptide variant may have the same or a similar activity as the reference polypeptide. Alternatively, the variant may have an altered activity (e.g., increased or decreased) relative to a reference polypeptide. Generally, variants of a particular polynucleotide or polypeptide of the invention will have at least about 40%, 45%, 50%, 55%, 60%, 65%, 70%, 75%, 80%, 85%, 90%, 91%, 92%, 93%, 94%, 95%, 96%, 97%, 98%, 99% but less than 100% sequence identity to that particular reference polynucleotide or polypeptide as determined by sequence alignment programs and parameters described herein and known to those skilled in the art. Such tools for alignment include those of the BLAST suite (Stephen F. Altschul, Thomas L. Madden, Alejandro A. Schïffer, Jinghui Zhang, Zheng Zhang, Webb Miller, and David J. Lipman (1997), “Gapped BLAST and PSI-BLAST: a new generation of protein database search programs”, Nucleic Acids Res. 25:3389-3402.) Other tools are described herein, specifically in the definition of “identity.”

[0101] Default parameters in the BLAST algorithm include, for example, an expect threshold of 10, Word size of 28, Match/Mismatch Scores 1, −2, Gap costs Linear. Any filter can be applied as well as a selection for species specific repeats, e.g., Homo sapiens.

[0102] In one embodiment, the polynucleotides, primary constructs, modified nucleic acids and/or mmRNA may be used to treat a disease, disorder and/or condition in a subject.

[0103] In one embodiment, the polynucleotides, primary constructs, modified nucleic acids and/or mmRNA may be used to reduce, eliminate or prevent tumor growth in a subject.

[0104] In one embodiment, the polynucleotides, primary constructs and/or mmRNA may be used to reduce and/or ameliorate at least one symptom of cancer in a subject. A symptom of cancer may include, but is not limited to, weakness, aches and pains, fever, fatigue, weight loss, blood clots, increased blood calcium levels, low white blood cell count, short of breath, dizziness, headaches, hyperpigmentation, jaundice, erthema, pruritis, excessive hair growth, change in bowel habits, change in bladder function, long-lasting sores, white patches inside the mouth, white spots on the tongue, unusual bleeding or discharge, thickening or lump on parts of the body, indigestion, trouble swallowing, changes in warts or moles, change in new skin and nagging cough or hoarseness. Further, the polynucleotides, primary constructs, modified nucleic acid and/or mmRNA may reduce a side-effect associated with cancer such as, but not limited to, chemo brain, peripheral neuropathy, fatigue, depression, nausea, vomiting, pain, anemia, lymphedema, infections, sexual side effects, reduced fertility or infertility, ostomics, insomnia and hair loss.

### Terminal Architecture Modifications: Untranslated Regions (UTRs)

[0105] Untranslated regions (UTRs) of a gene are transcribed but not translated. The 5′UTR starts at the transcription start site and continues to the start codon but does not include the start codon; whereas, the 3′UTR starts immediately following the stop codon and continues until the transcriptional termination signal. There is growing body of evidence about the regulatory roles played by the UTRs in terms of stability of the nucleic acid molecule and translation. The regulatory features of a UTR can be incorporated into the nucleic acids or modified RNA of the present invention to enhance the stability of the molecule. The specific features can also be incorporated to ensure controlled down-regulation of the transcript in case they are misdirected to undesired organs sites.

### 5′ UTR and Translation Initiation

[0106] Natural 5′UTRs bear features which play roles in for translation initiation. They harbor signatures like Kozak sequences which are commonly known to be involved in the process by which the ribosome initiates translation of many genes. Kozak sequences have the consensus CCR(A/G)CCAUGG, where R is a purine (adenine or guanine) three bases upstream of the start codon (AUG), which is followed by another ‘G’. 5′UTR also have been known to form secondary structures which are involved in elongation factor binding.

[0107] By engineering the features typically found in abundantly expressed genes of specific target organs, one can enhance the stability and protein production of the nucleic acids or mRNA of the invention. For example, introduction of 5′ UTR of liver-expressed mRNA, such as albumin, serum amyloid A, Apolipoprotein A/B/E, transferrin, alpha fetoprotein, erythropoietin, or Factor VIII, could be used to enhance expression of a nucleic acid molecule, such as a mmRNA, in hepatic cell lines or liver. Likewise, use of 5′ UTR from other tissue-specific mRNA to improve expression in that tissue is possible—for muscle (MyoD, Myosin, Myoglobin, Myogenin, Herculin), for endothelial cells (Tie-1, CD36), for myeloid cells (C/EBP, AML1, G-CSF, GM-CSF, CD1 lb, MSR, Fr-1, i-NOS), for leukocytes (CD45, CD18), for adipose tissue (CD36, GLUT4, ACRP30, adiponectin) and for lung epithelial cells (SP-A/B/C/D).

[0108] Other non-UTR sequences may be incorporated into the 5′ (or 3′ UTR) UTRs. For example, introns or portions of introns sequences may be incorporated into the flanking regions of the nucleic acids or mRNA of the invention. Incorporation of intronic sequences may increase protein production as well as mRNA levels.

[0109] The 5′UTR may selected for use in the present invention may be a structured UTR such as, but not limited to, 5′UTRs to control translation. As a non-limiting example, a structured 5′UTR may be beneficial when using any of the terminal modifications described in copending U.S. Provisional Application No. 61/758,921 filed Jan. 31, 2013, entitled Differential Targeting Using RNA Constructs; U.S. Provisional Application No. 61/781,139 filed Mar. 14, 2013, entitled Differential Targeting Using RNA Constructs; U.S. Provisional Application No. 61/729,933, filed Nov. 26, 2012 entitled Terminally Optimized RNAs and U.S. Provisional Application No. 61/737,224 filed Dec. 14, 2012 entitled Terminally Optimized RNAs; each of which is herein incorporated by reference in their entirety.

Incorporating microRNA Binding Sites

[0110] In one embodiment modified nucleic acids (mRNA), enhanced modified RNA or ribonucleic acids of the invention would not only encode a polypeptide but also a sensor sequence. Sensor sequences include, for example, microRNA binding sites, transcription factor binding sites, artificial binding sites engineered to act as pseudo-receptors for endogenous nucleic acid binding molecules.

[0111] In one embodiment, microRNA (miRNA) profiling of the target cells or tissues is conducted to determine the presence or absence of miRNA in the cells or tissues.

[0112] microRNAs (or miRNA) are 19-25 nucleotide long noncoding RNAs that bind to the 3′UTR of nucleic acid molecules and down-regulate gene expression either by reducing nucleic acid molecule stability or by inhibiting translation. The modified nucleic acids (mRNA), enhanced modified RNA or ribonucleic acids of the invention may comprise one or more microRNA target sequences, microRNA sequences, or microRNA seeds. Such sequences may correspond to any known microRNA such as those taught in US Publication US2005/0261218 and US Publication US2005/0059005, the contents of which are incorporated herein by reference in their entirety.

[0113] A microRNA sequence comprises a “seed” region, i.e., a sequence in the region of positions 2-8 of the mature microRNA, which sequence has perfect Watson-Crick complementarity to the miRNA target sequence. A microRNA seed may comprise positions 2-8 or 2-7 of the mature microRNA. In some embodiments, a microRNA seed may comprise 7 nucleotides (e.g., nucleotides 2-8 of the mature microRNA), wherein the seed-complementary site in the corresponding miRNA target is flanked by an adenine (A) opposed to microRNA position 1. In some embodiments, a microRNA seed may comprise 6 nucleotides (e.g., nucleotides 2-7 of the mature microRNA), wherein the seed-complementary site in the corresponding miRNA target is flanked by an adenine (A) opposed to microRNA position 1. See for example, Grimson A, Farh K K, Johnston W K, Garrett-Engele P, Lim L P, Bartel D P; Mol Cell. 2007 Jul. 6; 27(1):91-105. The bases of the microRNA seed have complete complementarity with the target sequence. By engineering microRNA target sequences into the 3′UTR of nucleic acids or mRNA of the invention one can target the molecule for degradation or reduced translation, provided the microRNA in question is available. This process will reduce the hazard of off target effects upon nucleic acid molecule delivery. Identification of microRNA, microRNA target regions, and their expression patterns and role in biology have been reported (Bonauer et al., Curr Drug Targets 2010 11:943-949; Anand and Cheresh Curr Opin Hematol 2011 18:171-176; Contreras and Rao Leukemia 2012 26:404-413 (2011 Dec. 20. doi: 10.1038/leu.2011.356); Bartel Cell 2009 136:215-233; Landgraf et al, Cell, 2007 129:1401-1414; Gentner and Naldini, Tissue Antigens. 2012 80:393-403 and all references therein; each of which is herein incorporated by reference in its entirety).

[0114] For example, if the mRNA is not intended to be delivered to the liver but ends up there, then miR-122, a microRNA abundant in liver, can inhibit the expression of the gene of interest if one or multiple target sites of miR-122 are engineered into the 3′UTR of the modified nucleic acids, enhanced modified RNA or ribonucleic acids. Introduction of one or multiple binding sites for different microRNA can be engineered to further decrease the longevity, stability, and protein translation of a modified nucleic acids, enhanced modified RNA or ribonucleic acids. As used herein, the term “microRNA site” refers to a microRNA target site or a microRNA recognition site, or any nucleotide sequence to which a microRNA binds or associates. It should be understood that “binding” may follow traditional Watson-Crick hybridization rules or may reflect any stable association of the microRNA with the target sequence at or adjacent to the microRNA site.

[0115] Conversely, for the purposes of the modified nucleic acids, enhanced modified RNA or ribonucleic acids of the present invention, microRNA binding sites can be engineered out of (i.e. removed from) sequences in which they naturally occur in order to increase protein expression in specific tissues. For example, miR-122 binding sites may be removed to improve protein expression in the liver.

[0116] Regulation of expression in multiple tissues can be accomplished through introduction or removal or one or several microRNA binding sites.

[0117] Examples of tissues where microRNA are known to regulate mRNA, and thereby protein expression, include, but are not limited to, liver (miR-122), muscle (miR-133, miR-206, miR-208), endothelial cells (miR-17-92, miR-126), myeloid cells (miR-142-3p, miR-142-5p, miR-16, miR-21, miR-223, miR-24, miR-27), adipose tissue (let-7, miR-30c), heart (miR-1d, miR-149), kidney (miR-192, miR-194, miR-204), and lung epithelial cells (let-7, miR-133, miR-126).

[0118] MicroRNA can also regulate complex biological processes such as angiogenesis (miR-132) (Anand and Cheresh Curr Opin Hematol 2011 18:171-176). In the modified nucleic acids, enhanced modified RNA or ribonucleic acids of the invention, binding sites for microRNAs that are involved in such processes may be removed or introduced, in order to tailor the expression of the modified nucleic acids, enhanced modified RNA or ribonucleic acids expression to biologically relevant cell types or to the context of relevant biological processes. In this context, the mRNA are defined as auxotrophic mRNA.

[0119] At least one microRNA site can be engineered into the 3′ UTR of the modified nucleic acids, enhanced modified RNA or ribonucleic acids of the present invention. In this context, at least two, at least three, at least four, at least five, at least six, at least seven, at least eight, at least nine, at least ten or more microRNA sites may be engineered into the 3′ UTR of the ribonucleic acids of the present invention. In one embodiment, the microRNA sites incorporated into the modified nucleic acids, enhanced modified RNA or ribonucleic acids may be the same or may be different microRNA sites. In another embodiment, the microRNA sites incorporated into the modified nucleic acids, enhanced modified RNA or ribonucleic acids may target the same or different tissues in the body. As a non-limiting example, through the introduction of tissue-, cell-type-, or disease-specific microRNA binding sites in the 3′ UTR of a modified nucleic acid mRNA, the degree of expression in specific cell types (e.g. hepatocytes, myeloid cells, endothelial cells, cancer cells, etc.) can be reduced.

[0120] In one embodiment, a nucleic acid may be engineered to include microRNA sites which are expressed in different tissues of a subject. As a non-limiting example, a modified nucleic acid, enhanced modified RNA or ribonucleic acid of the present invention may be engineered to include miR-192 and miR-122 to regulate expression of the modified nucleic acid, enhanced modified RNA or ribonucleic acid in the liver and kidneys of a subject. In another embodiment, a modified nucleic acid, enhanced modified RNA or ribonucleic acid may be engineered to include more than one microRNA sites for the same tissue. For example, a modified nucleic acid, enhanced modified RNA or ribonucleic acid of the present invention may be engineered to include miR-17-92 and miR-126 to regulate expression of the modified nucleic acid, enhanced modified RNA or ribonucleic acid in endothelial cells of a subject.

[0121] In one embodiment, the therapeutic window and or differential expression associated with the target polypeptide encoded by the modified nucleic acid, enhanced modified RNA or ribonucleic acid encoding a signal (also referred to herein as a polynucleotide) of the invention may be altered. For example, polynucleotides may be designed whereby a death signal is more highly expressed in cancer cells (or a survival signal in a normal cell) by virtue of the miRNA signature of those cells. Where a cancer cell expresses a lower level of a particular miRNA, the polynucleotide encoding the binding site for that miRNA (or miRNAs) would be more highly expressed. Hence, the target polypeptide encoded by the polynucleotide is selected as a protein which triggers or induces cell death. Neigboring noncancer cells, harboring a higher expression of the same miRNA would be less affected by the encoded death signal as the polynucleotide would be expressed at a lower level due to the affects of the miRNA binding to the binding site or “sensor” encoded in the 3′UTR. Conversely, cell survival or cytoprotective signals may be delivered to tissues containing cancer and non cancerous cells where a miRNA has a higher expression in the cancer cells—the result being a lower survival signal to the cancer cell and a larger survival signature to the normal cell. Multiple polynucleotides may be designed and administered having different signals according to the previous paradigm.

[0122] According to the present invention, the polynucleotides may be modified as to avoid the deficiencies of other polypeptide-encoding molecules of the art. Hence, in this embodiment the polynucleotides are referred to as modified polynucleotides.

[0123] Through an understanding of the expression patterns of microRNA in different cell types, modified nucleic acids, enhanced modified RNA or ribonucleic acids such as polynucleotides can be engineered for more targeted expression in specific cell types or only under specific biological conditions. Through introduction of tissue-specific microRNA binding sites, modified nucleic acids, enhanced modified RNA or ribonucleic acids, could be designed that would be optimal for protein expression in a tissue or in the context of a biological condition.

[0124] Transfection experiments can be conducted in relevant cell lines, using engineered modified nucleic acids, enhanced modified RNA or ribonucleic acids and protein production can be assayed at various time points post-transfection. For example, cells can be transfected with different microRNA binding site-engineering nucleic acids or mRNA and by using an ELISA kit to the relevant protein and assaying protein produced at 6 hr, 12 hr, 24 hr, 48 hr, 72 hr and 7 days post-transfection. In vivo experiments can also be conducted using microRNA-binding site-engineered molecules to examine changes in tissue-specific expression of formulated modified nucleic acids, enhanced modified RNA or ribonucleic acids.

Auxotrophic mRNA

[0125] In one embodiment, the nucleic acids or mRNA of the present invention may be auxotrophic. As used herein, the term “auxotrophic” refers to mRNA that comprises at least one feature that triggers, facilitates or induces the degradation or inactivation of the mRNA in response to spatial or temporal cues such that protein expression is substantially prevented or reduced. Such spatial or temporal cues include the location of the mRNA to be translated such as a particular tissue or organ or cellular environment. Also contemplated are cues involving temperature, pH, ionic strength, moisture content and the like.

[0126] In one embodiment, the feature is located in a terminal region of the nucleic acids or mRNA of the present invention. As a non-limiting example, the auxotrophic mRNA may contain a miR binding site in the terminal region which binds to a miR expressed in a selected tissue so that the expression of the auxotrophic mRNA is substantially prevented or reduced in the selected tissue. To this end and for example, an auxotrophic mRNA containing a miR-122 binding site will not produce protein if localized to the liver since miR-122 is expressed in the liver and binding of the miR would effectuate destruction of the auxotrophic mRNA.

[0127] In one embodiment, the degradation or inactivation of auxotrophic mRNA may comprise a feature responsive to a change in pH. As a non-limiting example, the auxotrophic mRNA may be triggered in an environment having a pH of between pH 4.5 to 8.0 such as at a pH of 5.0 to 6.0 or a pH of 6.0 to 6.5. The change in pH may be a change of 0.1 unit, 0.2 units, 0.3 units, 0.4 units, 0.5 units, 0.6 units, 0.7 units, 0.8 units, 0.9 units, 1.0 units, 1.1 units, 1.2 units, 1.3 units, 1.4 units, 1.5 units, 1.6 units, 1.7 units, 1.8 units, 1.9 units, 2.0 units, 2.1 units, 2.2 units, 2.3 units, 2.4 units, 2.5 units, 2.6 units, 2.7 units, 2.8 units, 2.9 units, 3.0 units, 3.1 units, 3.2 units, 3.3 units, 3.4 units, 3.5 units, 3.6 units, 3.7 units, 3.8 units, 3.9 units, 4.0 units or more.

[0128] In another embodiment, the degradation or inactivation of auxotrophic mRNA may be triggered or induced by changes in temperature. As a non-limiting example, a change of temperature from room temperature to body temperature. The change of temperature may be less than 1° C., less than 5° C., less than 10° C., less than 15° C., less than 20° C., less than 25° C. or more than 25° C.

[0129] In yet another embodiment, the degradation or inactivation of auxotrophic mRNA may be triggered or induced by a change in the levels of ions in the subject. The ions may be cations or anions such as, but not limited to, sodium ions, potassium ions, chloride ions, calcium ions, magnesium ions and/or phosphate ions.

### 3′ UTR and the AU Rich Elements

[0130] 3′UTRs are known to have stretches of Adenosines and Uridines embedded in them. These AU rich signatures are particularly prevalent in genes with high rates of turnover. Based on their sequence features and functional properties, the AU rich elements (AREs) can be separated into three classes (Chen et al, 1995): Class I AREs contain several dispersed copies of an AUUUA motif within U-rich regions. C-Myc and MyoD contain class I AREs. Class II AREs possess two or more overlapping UUAUUUA(U/A)(U/A) nonamers. Molecules containing this type of AREs include GM-CSF and TNF-a. Class III ARES are less well defined. These U rich regions do not contain an AUUUA motif. c-Jun and Myogenin are two well-studied examples of this class. Most proteins binding to the AREs are known to destabilize the messenger, whereas members of the ELAV family, most notably HuR, have been documented to increase the stability of mRNA. HuR binds to AREs of all the three classes. Engineering the HuR specific binding sites into the 3′ UTR of nucleic acid molecules will lead to HuR binding and thus, stabilization of the message in vivo.

[0131] Introduction, removal or modification of 3′ UTR AU rich elements (AREs) can be used to modulate the stability of nucleic acids or mRNA of the invention. When engineering specific nucleic acids or mRNA, one or more copies of an ARE can be introduced to make nucleic acids or mRNA of the invention less stable and thereby curtail translation and decrease production of the resultant protein. Likewise, AREs can be identified and removed or mutated to increase the intracellular stability and thus increase translation and production of the resultant protein. Transfection experiments can be conducted in relevant cell lines, using nucleic acids or mRNA of the invention and protein production can be assayed at various time points post-transfection. For example, cells can be transfected with different ARE-engineering molecules and by using an ELISA kit to the relevant protein and assaying protein produced at 6 hr, 12 hr, 24 hr, 48 hr, and 7 days post-transfection.

### 3′ UTR and Triple Helices

[0132] In one embodiment, nucleic acids of the present invention may include a triple helix on the 3′ end of the modified nucleic acid, enhanced modified RNA or ribonucleic acid. The 3′ end of the nucleic acids of the present invention may include a triple helix alone or in combination with a Poly-A tail.

[0133] In one embodiment, the nucleic acid of the present invention may comprise at least a first and a second U-rich region, a conserved stem loop region between the first and second region and an A-rich region. The first and second U-rich region and the A-rich region may associate to form a triple helix on the 3′ end of the nucleic acid. This triple helix may stabilize the nucleic acid, enhance the translational efficiency of the nucleic acid and/or protect the 3′ end from degradation. Exemplary triple helices include, but are not limited to, the triple helix sequence of metastasis-associated lung adenocarcinoma transcript 1 (MALAT1), MEN-β and polyadenylated nuclear (PAN) RNA (See Wilusz et al., Genes & Development 2012 26:2392-2407; herein incorporated by reference in its entirety). In one embodiment, the 3′ end of the modified nucleic acids, enhanced modified RNA or ribonucleic acids of the present invention comprises a first U-rich region comprising TTTTTCTTTT (SEQ ID NO: 1), a second U-rich region comprising TTTTGCTTTTT (SEQ ID NO: 2) or TTTTGCTTTT (SEQ ID NO: 3), an A-rich region comprising AAAAAGCAAAA (SEQ ID NO: 4). In another embodiment, the 3′ end of the nucleic acids of the present invention comprises a triple helix formation structure comprising a first U-rich region, a conserved region, a second U-rich region and an A-rich region.

### 5′ Capping

[0134] The 5′ cap structure of an mRNA is involved in nuclear export, increasing mRNA stability and binds the mRNA Cap Binding Protein (CBP), which is responsible for mRNA stability in the cell and translation competency through the association of CBP with poly(A) binding protein to form the mature cyclic mRNA species. The cap further assists the removal of 5′ proximal introns removal during mRNA splicing.

[0135] Endogenous mRNA molecules may be 5′-end capped generating a 5′-ppp-5′-triphosphate linkage between a terminal guanosine cap residue and the 5′-terminal transcribed sense nucleotide of the mRNA. This 5′-guanylate cap may then be methylated to generate an N7-methyl-guanylate residue. The ribose sugars of the terminal and/or anteterminal transcribed nucleotides of the 5′ end of the mRNA may optionally also be 2′-O-methylated. 5′-decapping through hydrolysis and cleavage of the guanylate cap structure may target a nucleic acid molecule, such as an mRNA molecule, for degradation.

[0136] Modifications to the nucleic acids of the present invention may generate a non-hydrolyzable cap structure preventing decapping and thus increasing mRNA half-life. Because cap structure hydrolysis requires cleavage of 5′-ppp-5′ phosphorodiester linkages, modified nucleotides may be used during the capping reaction. For example, a Vaccinia Capping Enzyme from New England Biolabs (Ipswich, Mass.) may be used with α-thio-guanosine nucleotides according to the manufacturer's instructions to create a phosphorothioate linkage in the 5′-ppp-5′ cap. Additional modified guanosine nucleotides may be used such as α-methyl-phosphonate and seleno-phosphate nucleotides.

[0137] Additional modifications include, but are not limited to, 2′-O-methylation of the ribose sugars of 5′-terminal and/or 5′-anteterminal nucleotides of the mRNA (as mentioned above) on the 2′-hydroxyl group of the sugar ring. Multiple distinct 5′-cap structures can be used to generate the 5′-cap of a nucleic acid molecule, such as an mRNA molecule.

[0138] Cap analogs, which herein are also referred to as synthetic cap analogs, chemical caps, chemical cap analogs, or structural or functional cap analogs, differ from natural (i.e. endogenous, wild-type or physiological) 5′-caps in their chemical structure, while retaining cap function. Cap analogs may be chemically (i.e. non-enzymatically) or enzymatically synthesized and/linked to a nucleic acid molecule.

[0139] For example, the Anti-Reverse Cap Analog (ARCA) cap contains two guanines linked by a 5′-5′-triphosphate group, wherein one guanine contains an N7 methyl group as well as a 3′-O-methyl group (i.e., N7,3′-O-dimethyl-guanosine-5′-triphosphate-5′-guanosine (m⁷G-3′mppp-G; which may equivalently be designated 3′ O-Me-m7G(5′)ppp(5′)G). The 3′-O atom of the other, unmodified, guanine becomes linked to the 5′-terminal nucleotide of the capped nucleic acid molecule (e.g. an mRNA or mmRNA). The N7- and 3′-O-methlyated guanine provides the terminal moiety of the capped nucleic acid molecule (e.g. mRNA or mmRNA).

[0140] Another exemplary cap is mCAP, which is similar to ARCA but has a 2′-O-methyl group on guanosine (i.e., N7,2′-O-dimethyl-guanosine-5′-triphosphate-5′-guanosine, m⁷Gm-ppp-G).

[0141] While cap analogs allow for the concomitant capping of a nucleic acid molecule in an in vitro transcription reaction, up to 20% of transcripts remain uncapped. This, as well as the structural differences of a cap analog from an endogenous 5′-cap structures of nucleic acids produced by the endogenous, cellular transcription machinery, may lead to reduced translational competency and reduced cellular stability.

[0142] Modified nucleic acids of the invention may also be capped post-transcriptionally, using enzymes, in order to generate more authentic 5′-cap structures. As used herein, the phrase “more authentic” refers to a feature that closely mirrors or mimics, either structurally or functionally, an endogenous or wild type feature. That is, a “more authentic” feature is better representative of an endogenous, wild-type, natural or physiological cellular function and/or structure as compared to synthetic features or analogs, etc., of the prior art, or which outperforms the corresponding endogenous, wild-type, natural or physiological feature in one or more respects. Non-limiting examples of more authentic 5′cap structures of the present invention are those which, among other things, have enhanced binding of cap binding proteins, increased half life, reduced susceptibility to 5′ endonucleases and/or reduced 5′decapping, as compared to synthetic 5′cap structures known in the art (or to a wild-type, natural or physiological 5′cap structure). For example, recombinant Vaccinia Virus Capping Enzyme and recombinant 2′-O-methyltransferase enzyme can create a canonical 5′-5′-triphosphate linkage between the 5′-terminal nucleotide of an mRNA and a guanine cap nucleotide wherein the cap guanine contains an N7 methylation and the 5′-terminal nucleotide of the mRNA contains a 2′-O-methyl. Such a structure is termed the Cap1 structure. This cap results in a higher translational-competency and cellular stability and a reduced activation of cellular pro-inflammatory cytokines, as compared, e.g., to other 5′cap analog structures known in the art. Cap structures include 7mG(5′)ppp(5′)N, pN2p (cap 0), 7mG(5′)ppp(5′)NlmpNp (cap 1), 7mG(5′)-ppp(5′)NlmpN2mp (cap 2) and m(7)Gpppm(3)(6,6,2′)Apm(2′)Apm(2′)Cpm(2)(3,2′)Up (cap 4).

[0143] Because the modified nucleic acids may be capped post-transcriptionally, and because this process is more efficient, nearly 100% of the modified nucleic acids may be capped. This is in contrast to ˜80% when a cap analog is linked to an mRNA in the course of an in vitro transcription reaction.

[0144] According to the present invention, 5′ terminal caps may include endogenous caps or cap analogs. According to the present invention, a 5′ terminal cap may comprise a guanine analog. Useful guanine analogs include inosine, N1-methyl-guanosine, 2′fluoro-guanosine, 7-deaza-guanosine, 8-oxo-guanosine, 2-amino-guanosine, LNA-guanosine, and 2-azido-guanosine.

### 3′ UTR and Viral Sequences

[0145] Additional viral sequences such as, but not limited to, the translation enhancer sequence of the barley yellow dwarf virus (BYDV-PAV) can be engineered and inserted in the 3′ UTR of the nucleic acids or mRNA of the invention and can stimulate the translation of the construct in vitro and in vivo. Transfection experiments can be conducted in relevant cell lines at and protein production can be assayed by ELISA at 12 hr, 24 hr, 48 hr, 72 hr and day 7 post-transfection.

### IRES Sequences

[0146] Further, provided are nucleic acids containing an internal ribosome entry site (IRES). First identified as a feature Picorna virus RNA, IRES plays an important role in initiating protein synthesis in absence of the 5′ cap structure. An IRES may act as the sole ribosome binding site, or may serve as one of multiple ribosome binding sites of an mRNA. Nucleic acids or mRNA containing more than one functional ribosome binding site may encode several peptides or polypeptides that are translated independently by the ribosomes (“multicistronic nucleic acid molecules”). When nucleic acids or mRNA are provided with an IRES, further optionally provided is a second translatable region. Examples of IRES sequences that can be used according to the invention include without limitation, those from picornaviruses (e.g. FMDV), pest viruses (CFFV), polio viruses (PV), encephalomyocarditis viruses (ECMV), foot-and-mouth disease viruses (FMDV), hepatitis C viruses (HCV), classical swine fever viruses (CSFV), murine leukemia virus (MLV), simian immune deficiency viruses (SIV) or cricket paralysis viruses (CrPV).

### Transcriptional Control Elements

[0147] The modified nucleic acids (e.g., polynucleotides, primary constructs and/or mmRNAs) of the present invention may comprise transcriptional control elements. The transcriptional control elements may be isolated and/or derived from any genome such as, but not limited to, mammalian, viral and bacterial. Further, the transcriptional control elements may be synthetic derived from isolated elements in various genomes such as, but not limited to, mammalian, viral and bacterial. As a non-limiting example, the modified nucleic acids may include a transcriptional control element from bacteria derived from converting cis-regulators of translation into synthetic translation coupled regulators as described in International Publication No. WO2013049330, herein incorporated by reference in its entirety.

### Terminal Architecture Modifications: Poly-A Tails

[0148] During RNA processing, a long chain of adenine nucleotides (poly-A tail) is normally added to a messenger RNA (mRNA) molecules to increase the stability of the molecule. Immediately after transcription, the 3′ end of the transcript is cleaved to free a 3′ hydroxyl. Then poly-A polymerase adds a chain of adenine nucleotides to the RNA. The process, called polyadenylation, adds a poly-A tail that is between 100 and 250 residues long.

[0149] It has been discovered that unique poly-A tail lengths provide certain advantages to the modified RNAs of the present invention.

[0150] Generally, the length of a poly-A tail of the present invention is greater than 30 nucleotides in length. In another embodiment, the poly-A tail is greater than 35 nucleotides in length. In another embodiment, the length is at least 40 nucleotides. In another embodiment, the length is at least 45 nucleotides. In another embodiment, the length is at least 55 nucleotides. In another embodiment, the length is at least 60 nucleotides. In another embodiment, the length is at least 60 nucleotides. In another embodiment, the length is at least 80 nucleotides. In another embodiment, the length is at least 90 nucleotides. In another embodiment, the length is at least 100 nucleotides. In another embodiment, the length is at least 120 nucleotides. In another embodiment, the length is at least 140 nucleotides. In another embodiment, the length is at least 160 nucleotides. In another embodiment, the length is at least 180 nucleotides. In another embodiment, the length is at least 200 nucleotides. In another embodiment, the length is at least 250 nucleotides. In another embodiment, the length is at least 300 nucleotides. In another embodiment, the length is at least 350 nucleotides. In another embodiment, the length is at least 400 nucleotides. In another embodiment, the length is at least 450 nucleotides. In another embodiment, the length is at least 500 nucleotides. In another embodiment, the length is at least 600 nucleotides. In another embodiment, the length is at least 700 nucleotides. In another embodiment, the length is at least 800 nucleotides. In another embodiment, the length is at least 900 nucleotides. In another embodiment, the length is at least 1000 nucleotides. In another embodiment, the length is at least 1100 nucleotides. In another embodiment, the length is at least 1200 nucleotides. In another embodiment, the length is at least 1300 nucleotides. In another embodiment, the length is at least 1400 nucleotides. In another embodiment, the length is at least 1500 nucleotides. In another embodiment, the length is at least 1600 nucleotides. In another embodiment, the length is at least 1700 nucleotides. In another embodiment, the length is at least 1800 nucleotides. In another embodiment, the length is at least 1900 nucleotides. In another embodiment, the length is at least 2000 nucleotides. In another embodiment, the length is at least 2500 nucleotides. In another embodiment, the length is at least 3000 nucleotides.

[0151] In some embodiments, the nucleic acid or mRNA includes from about 30 to about 3,000 nucleotides (e.g., from 30 to 50, from 30 to 100, from 30 to 250, from 30 to 500, from 30 to 750, from 30 to 1,000, from 30 to 1,500, from 30 to 2,000, from 30 to 2,500, from 50 to 100, from 50 to 250, from 50 to 500, from 50 to 750, from 50 to 1,000, from 50 to 1,500, from 50 to 2,000, from 50 to 2,500, from 50 to 3,000, from 100 to 500, from 100 to 750, from 100 to 1,000, from 100 to 1,500, from 100 to 2,000, from 100 to 2,500, from 100 to 3,000, from 500 to 750, from 500 to 1,000, from 500 to 1,500, from 500 to 2,000, from 500 to 2,500, from 500 to 3,000, from 1,000 to 1,500, from 1,000 to 2,000, from 1,000 to 2,500, from 1,000 to 3,000, from 1,500 to 2,000, from 1,500 to 2,500, from 1,500 to 3,000, from 2,000 to 3,000, from 2,000 to 2,500, and from 2,500 to 3,000).

[0152] In one embodiment, the poly-A tail is designed relative to the length of the overall modified RNA molecule. This design may be based on the length of the coding region of the modified RNA, the length of a particular feature or region of the modified RNA (such as the mRNA), or based on the length of the ultimate product expressed from the modified RNA. When relative to any additional feature of the modified RNA (e.g., other than the mRNA portion which includes the poly-A tail) the poly-A tail may be 10, 20, 30, 40, 50, 60, 70, 80, 90 or 100% greater in length than the additional feature. The poly-A tail may also be designed as a fraction of the modified RNA to which it belongs. In this context, the poly-A tail may be 10, 20, 30, 40, 50, 60, 70, 80, or 90% or more of the total length of the construct or the total length of the construct minus the poly-A tail. Further, engineered binding sites and conjugation of nucleic acids or mRNA for Poly-A binding protein may enhance expression.

[0153] Additionally, multiple distinct nucleic acids or mRNA may be linked together to the PABP (Poly-A binding protein) through the 3′-end using modified nucleotides at the 3′-terminus of the poly-A tail. Transfection experiments can be conducted in relevant cell lines at and protein production can be assayed by ELISA at 12 hr, 24 hr, 48 hr, 72 hr and day 7 post-transfection.

[0154] In one embodiment, the nucleic acids or mRNA of the present invention are designed to include a polyA-G Quartet. The G-quartet is a cyclic hydrogen bonded array of four guanine nucleotides that can be formed by G-rich sequences in both DNA and RNA. In this embodiment, the G-quartet is incorporated at the end of the poly-A tail. The resultant nucleic acid or mRNA may be assayed for stability, protein production and other parameters including half-life at various time points. It has been discovered that the polyA-G quartet results in protein production equivalent to at least 75% of that seen using a poly-A tail of 120 nucleotides alone.

### Quantification

[0155] In one embodiment, the polynucleotides, primary constructs, modified nucleic acids or mmRNA of the present invention may be quantified in exosomes derived from one or more bodily fluid. As used herein “bodily fluids” include peripheral blood, serum, plasma, ascites, urine, cerebrospinal fluid (CSF), sputum, saliva, bone marrow, synovial fluid, aqueous humor, amniotic fluid, cerumen, breast milk, broncheoalveolar lavage fluid, semen, prostatic fluid, cowper's fluid or pre-ejaculatory fluid, sweat, fecal matter, hair, tears, cyst fluid, pleural and peritoneal fluid, pericardial fluid, lymph, chyme, chyle, bile, interstitial fluid, menses, pus, sebum, vomit, vaginal secretions, mucosal secretion, stool water, pancreatic juice, lavage fluids from sinus cavities, bronchopulmonary aspirates, blastocyl cavity fluid, and umbilical cord blood. Alternatively, exosomes may be retrieved from an organ selected from the group consisting of lung, heart, pancreas, stomach, intestine, bladder, kidney, ovary, testis, skin, colon, breast, prostate, brain, esophagus, liver, and placenta.

[0156] In the quantification method, a sample of not more than 2 mL is obtained from the subject and the exosomes isolated by size exclusion chromatography, density gradient centrifugation, differential centrifugation, nanomembrane ultrafiltration, immunoabsorbent capture, affinity purification, microfluidic separation, or combinations thereof. In the analysis, the level or concentration of the polynucleotides, primary construct, modified nucleic acid or mmRNA may be an expression level, presence, absence, truncation or alteration of the administered construct. It is advantageous to correlate the level with one or more clinical phenotypes or with an assay for a human disease biomarker. The assay may be performed using construct specific probes, cytometry, qRT-PCR, real-time PCR, PCR, flow cytometry, electrophoresis, mass spectrometry, or combinations thereof while the exosomes may be isolated using immunohistochemical methods such as enzyme linked immunosorbent assay (ELISA) methods. Exosomes may also be isolated by size exclusion chromatography, density gradient centrifugation, differential centrifugation, nanomembrane ultrafiltration, immunoabsorbent capture, affinity purification, microfluidic separation, or combinations thereof.

[0157] These methods afford the investigator the ability to monitor, in real time, the level of the polynucleotides, primary constructs, modified nucleic acid or mmRNA remaining or delivered. This is possible because the polynucleotides, primary constructs, modified nucleic acid or mmRNA of the present invention differ from the endogenous forms due to the structural and/or chemical modifications.

### II. Design and Synthesis of Polynucleotides

[0158] Polynucleotides, primary constructs modified nucleic acids or mmRNA for use in accordance with the invention may be prepared according to any available technique including, but not limited to chemical synthesis, enzymatic synthesis, which is generally termed in vitro transcription (IVT) or enzymatic or chemical cleavage of a longer precursor, etc. Methods of synthesizing RNAs are known in the art (see, e.g., Gait, M. J. (ed.) Oligonucleotide synthesis: a practical approach, Oxford [Oxfordshire], Washington, D.C.: IRL Press, 1984; and Herdewijn, P. (ed.) Oligonucleotide synthesis: methods and applications, Methods in Molecular Biology, v. 288 (Clifton, N.J.) Totowa, N.J.: Humana Press, 2005; both of which are incorporated herein by reference).

[0159] The process of design and synthesis of the primary constructs of the invention generally includes the steps of gene construction, mRNA production (either with or without modifications) and purification. In the enzymatic synthesis method, a target polynucleotide sequence encoding the polypeptide of interest is first selected for incorporation into a vector which will be amplified to produce a cDNA template. Optionally, the target polynucleotide sequence and/or any flanking sequences may be codon optimized. The cDNA template is then used to produce mRNA through in vitro transcription (IVT). After production, the mRNA may undergo purification and clean-up processes. The steps of which are provided in more detail below.

### Gene Construction

[0160] The step of gene construction may include, but is not limited to gene synthesis, vector amplification, plasmid purification, plasmid linearization and clean-up, and cDNA template synthesis and clean-up.

### Gene Synthesis

[0161] Once a polypeptide of interest, or target, is selected for production, a primary construct is designed. Within the primary construct, a first region of linked nucleosides encoding the polypeptide of interest may be constructed using an open reading frame (ORF) of a selected nucleic acid (DNA or RNA) transcript. The ORF may comprise the wild type ORF, an isoform, variant or a fragment thereof. As used herein, an “open reading frame” or “ORF” is meant to refer to a nucleic acid sequence (DNA or RNA) which is capable of encoding a polypeptide of interest. ORFs often begin with the start codon, ATG and end with a nonsense or termination codon or signal.

[0162] Further, the nucleotide sequence of the first region may be codon optimized. Codon optimization methods are known in the art and may be useful in efforts to achieve one or more of several goals. These goals include to match codon frequencies in target and host organisms to ensure proper folding, bias GC content to increase mRNA stability or reduce secondary structures, minimize tandem repeat codons or base runs that may impair gene construction or expression, customize transcriptional and translational control regions, insert or remove protein trafficking sequences, remove/add post translation modification sites in encoded protein (e.g. glycosylation sites), add, remove or shuffle protein domains, insert or delete restriction sites, modify ribosome binding sites and mRNA degradation sites, to adjust translational rates to allow the various domains of the protein to fold properly, or to reduce or eliminate problem secondary structures within the mRNA. Codon optimization tools, algorithms and services are known in the art, non-limiting examples include services from GeneArt (Life Technologies) and/or DNA2.0 (Menlo Park Calif.). In one embodiment, the ORF sequence is optimized using optimization algorithms. Codon options for each amino acid are given in Table 1.

TABLE 1
Codon Options

| | Single | |
|---|---|---|
| | Letter | |
| Amino Acid | Code | Codon Options |
| Isoleucine | I | ATT, ATC, ATA |
| Leucine | L | CTT, CTC, CTA, CTG, TTA, TTG |
| Valine | V | GTT, GTC, GTA, GTG |
| Phenylalanine | F | TTT, TTC |
| Methionine | M | ATG |
| Cysteine | C | TGT, TGC |
| Alanine | A | GCT, GCC, GCA, GCG |
| Glycine | G | GGT, GGC, GGA, GGG |
| Proline | P | CCT, CCC, CCA, CCG |
| Threonine | T | ACT, ACC, ACA, ACG |
| Serine | S | TCT, TCC, TCA, TCG, AGT, AGC |
| Tyrosine | Y | TAT, TAC |
| Tryptophan | W | TGG |
| Glutamine | Q | CAA, CAG |
| Asparagine | N | AAT, AAC |
| Histidine | H | CAT, CAC |
| Glutamic acid | E | GAA, GAG |
| Aspartic acid | D | GAT, GAC |
| Lysine | K | AAA, AAG |
| Arginine | R | CGT, CGC, CGA, CGG, AGA, AGG |
| Selenocysteine | Sec | UGA in mRNA in presence of |
| | | Selenocystein insertion |
| | | element (SECIS) |
| Stop codons | Stop | TAA, TAG, TGA |

[0163] Features, which may be considered beneficial in some embodiments of the present invention, may be encoded by the primary construct and may flank the ORF as a first or second flanking region. The flanking regions may be incorporated into the primary construct before and/or after optimization of the ORF. It is not required that a primary construct contain both a 5′ and 3′ flanking region. Examples of such features include, but are not limited to, untranslated regions (UTRs), Kozak sequences, an oligo(dT) sequence, and detectable tags and may include multiple cloning sites which may have XbaI recognition.

[0164] In some embodiments, a 5′ UTR and/or a 3′ UTR may be provided as flanking regions. Multiple 5′ or 3′ UTRs may be included in the flanking regions and may be the same or of different sequences. Any portion of the flanking regions, including none, may be codon optimized and any may independently contain one or more different structural or chemical modifications, before and/or after codon optimization. Combinations of features may be included in the first and second flanking regions and may be contained within other features. For example, the ORF may be flanked by a 5′ UTR which may contain a strong Kozak translational initiation signal and/or a 3′ UTR which may include an oligo(dT) sequence for templated addition of a poly-A tail.

[0165] Tables 2 and 3 provide a listing of exemplary UTRs which may be utilized in the primary construct of the present invention as flanking regions. Shown in Table 2 is a non-exhaustive listing of a 5′-untranslated region of the invention. Variants of 5′ UTRs may be utilized wherein one or more nucleotides are added or removed to the termini, including A, T, C or G. Additional 5′ untranslated regions are listed in Tables 21 and 22.

TABLE 2
5′-Untranslated Regions

| 5′ UTR | Name/ | | SEQ |
|---|---|---|---|
| Identi- | Descrip- | | ID |
| fier | tion | Sequence | NO. |
| Native | Wild type | See wild type sequence | — |
| | UTR | | |
| 5UTR-001 | Upstream | GGGAAATAAGAGAGAAAAGAAGAGTAAG | 5 |
| | UTR | AAGAAATATAAGAGCCACC | |

[0166] In another embodiment, the 5′ UTR may comprise a first polynucleotide fragment and a second polynucleotide fragment where the first and second fragments may be from the same or different gene. (See e.g., US20100293625, US20110247090 and EP2535419, each of which is herein incorporated by reference in its entirety). As a non-limiting example, the first polynucleotide may be a fragment of the canine, human or mouse SERCA2 gene and/or the second polynucleotide fragment is a fragment of the bovine, mouse, rat or sheep beta-casein gene.

[0167] In one embodiment, the first polynucleotide fragment may be located on the 5′ end of the second polynucleotide fragment. (See e.g., US20100293625 and US20110247090, each of which is herein incorporated by reference in its entirety).

[0168] In another embodiment, the first polynucleotide fragment may comprise the second intron of a sarcoplasmic/endoplasmic reticulum calcium ATPase gene and/or the second polynucleotide fragment comprises at least a portion of the 5′ UTR of a eukaryotic casein gene. (See e.g., US20100293625 and US20110247090, each of which is herein incorporated by reference in its entirety). The first polynucleotide fragment may also comprise at least a portion of exon 2 and/or exon 3 of the sarcoplasmic/endoplasmic reticulum calcium ATPase gene. (See e.g., US20100293625 and US20110247090, each of which is herein incorporated by reference in its entirety).

[0169] Shown in Table 3 is a non-exhaustive listing of 3′-untranslated regions of the invention. Variants of 3′ UTRs may be utilized wherein one or more nucleotides are added or removed to the termini, including A, T, C or G.

TABLE 3
3′-Untranslated Regions

| 3′ UTR | Name/ | | SEQ |
|---|---|---|---|
| Identifier | Description | Sequence | ID NO. |
| 3UTR-001 | Creatine Kinase | GCGCCTGCCCACCTGCCACCGACTGCTGGAACC | 6 |
| | | CAGCCAGTGGGAGGGCCTGGCCCACCAGAGTC | |
| | | CTGCTCCCTCACTCCTCGCCCCGCCCCCTGTCCC | |
| | | AGAGTCCCACCTGGGGGCTCTCTCCACCCTTCT | |
| | | CAGAGTTCCAGTTTCAACCAGAGTTCCAACCAA | |
| | | TGGGCTCCATCCTCTGGATTCTGGCCAATGAAA | |
| | | TATCTCCCTGGCAGGGTCCTCTTCTTTTCCCAGA | |
| | | GCTCCACCCCAACCAGGAGCTCTAGTTAATGGA | |
| | | GAGCTCCCAGCACACTCGGAGCTTGTGCTTTGT | |
| | | CTCCACGCAAAGCGATAAATAAAAGCATTGGT | |
| | | GGCCTTTGGTCTTTGAATAAAGCCTGAGTAGGA | |
| | | AGTCTAGA | |
| 3UTR-002 | Myoglobin | GCCCCTGCCGCTCCCACCCCCACCCATCTGGGC | 7 |
| | | CCCGGGTTCAAGAGAGAGCGGGGTCTGATCTCG | |
| | | TGTAGCCATATAGAGTTTGCTTCTGAGTGTCTG | |
| | | CTTTGTTTAGTAGAGGTGGGCAGGAGGAGCTGA | |
| | | GGGGCTGGGGCTGGGGTGTTGAAGTTGGCTTTG | |
| | | CATGCCCAGCGATGCGCCTCCCTGTGGGATGTC | |
| | | ATCACCCTGGGAACCGGGAGTGGCCCTTGGCTC | |
| | | ACTGTGTTCTGCATGGTTTGGATCTGAATTAATT | |
| | | GTCCTTTCTTCTAAATCCCAACCGAACTTCTTCC | |
| | | AACCTCCAAACTGGCTGTAACCCCAAATCCAAG | |
| | | CCATTAACTACACCTGACAGTAGCAATTGTCTG | |
| | | ATTAATCACTGGCCCCTTGAAGACAGCAGAATG | |
| | | TCCCTTTGCAATGAGGAGGAGATCTGGGCTGGG | |
| | | CGGGCCAGCTGGGGAAGCATTTGACTATCTGGA | |
| | | ACTTGTGTGTGCCTCCTCAGGTATGGCAGTGAC | |
| | | TCACCTGGTTTTAATAAAACAACCTGCAACATC | |
| | | TCATGGTCTTTGAATAAAGCCTGAGTAGGAAGT | |
| | | CTAGA | |
| 3UTR-003 | α-actin | ACACACTCCACCTCCAGCACGCGACTTCTCAGG | 8 |
| | | ACGACGAATCTTCTCAATGGGGGGGCGGCTGA | |
| | | GCTCCAGCCACCCCGCAGTCACTTTCTTTGTAA | |
| | | CAACTTCCGTTGCTGCCATCGTAAACTGACACA | |
| | | GTGTTTATAACGTGTACATACATTAACTTATTAC | |
| | | CTCATTTTGTTATTTTTCGAAACAAAGCCCTGTG | |
| | | GAAGAAAATGGAAAACTTGAAGAAGCATTAAA | |
| | | GTCATTCTGTTAAGCTGCGTAAATGGTCTTTGA | |
| | | ATAAAGCCTGAGTAGGAAGTCTAGA | |
| 3UTR-004 | Albumin | CATCACATTTAAAAGCATCTCAGCCTACCATGA | 9 |
| | | GAATAAGAGAAAGAAAATGAAGATCAAAAGCT | |
| | | TATTCATCTGTTTTTCTTTTTCGTTGGTGTAAAG | |
| | | CCAACACCCTGTCTAAAAAACATAAATTTCTTT | |
| | | AATCATTTTGCCTCTTTTCTCTGTGCTTCAATTA | |
| | | ATAAAAAATGGAAAGAATCTAATAGAGTGGTA | |
| | | CAGCACTGTTATTTTTCAAAGATGTGTTGCTATC | |
| | | CTGAAAATTCTGTAGGTTCTGTGGAAGTTCCAG | |
| | | TGTTCTCTCTTATTCCACTTCGGTAGAGGATTTC | |
| | | TAGTTTCTTGTGGGCTAATTAAATAAATCATTA | |
| | | ATACTCTTCTAATGGTCTTTGAATAAAGCCTGA | |
| | | GTAGGAAGTCTAGA | |
| 3UTR-005 | α-globin | GCTGCCTTCTGCGGGGCTTGCCTTCTGGCCATG | 10 |
| | | CCCTTCTTCTCTCCCTTGCACCTGTACCTCTTGG | |
| | | TCTTTGAATAAAGCCTGAGTAGGAAGGCGGCCG | |
| | | CTCGAGCATGCATCTAGA | |
| 3UTR-006 | G-CSF | GCCAAGCCCTCCCCATCCCATGTATTTATCTCTA | 11 |
| | | TTTAATATTTATGTCTATTTAAGCCTCATATTTA | |
| | | AAGACAGGGAAGAGCAGAACGGAGCCCCAGGC | |
| | | CTCTGTGTCCTTCCCTGCATTTCTGAGTTTCATT | |
| | | CTCCTGCCTGTAGCAGTGAGAAAAAGCTCCTGT | |
| | | CCTCCCATCCCCTGGACTGGGAGGTAGATAGGT | |
| | | AAATACCAAGTATTTATTACTATGACTGCTCCC | |
| | | CAGCCCTGGCTCTGCAATGGGCACTGGGATGAG | |
| | | CCGCTGTGAGCCCCTGGTCCTGAGGGTCCCCAC | |
| | | CTGGGACCCTTGAGAGTATCAGGTCTCCCACGT | |
| | | GGGAGACAAGAAATCCCTGTTTAATATTTAAAC | |
| | | AGCAGTGTTCCCCATCTGGGTCCTTGCACCCCT | |
| | | CACTCTGGCCTCAGCCGACTGCACAGCGGCCCC | |
| | | TGCATCCCCTTGGCTGTGAGGCCCCTGGACAAG | |
| | | CAGAGGTGGCCAGAGCTGGGAGGCATGGCCCT | |
| | | GGGGTCCCACGAATTTGCTGGGGAATCTCGTTT | |
| | | TTCTTCTTAAGACTTTTGGGACATGGTTTGACTC | |
| | | CCGAACATCACCGACGCGTCTCCTGTTTTTCTG | |
| | | GGTGGCCTCGGGACACCTGCCCTGCCCCCACGA | |
| | | GGGTCAGGACTGTGACTCTTTTTAGGGCCAGGC | |
| | | AGGTGCCTGGACATTTGCCTTGCTGGACGGGGA | |
| | | CTGGGGATGTGGGAGGGAGCAGACAGGAGGAA | |
| | | TCATGTCAGGCCTGTGTGTGAAAGGAAGCTCCA | |
| | | CTGTCACCCTCCACCTCTTCACCCCCCACTCACC | |
| | | AGTGTCCCCTCCACTGTCACATTGTAACTGAAC | |
| | | TTCAGGATAATAAAGTGTTTGCCTCCATGGTCT | |
| | | TTGAATAAAGCCTGAGTAGGAAGGCGGCCGCT | |
| | | CGAGCATGCATCTAGA | |
| 3UTR-007 | Col1a2; | ACTCAATCTAAATTAAAAAAGAAAGAAATTTG | 12 |
| | collagen, type I, | AAAAAACTTTCTCTTTGCCATTTCTTCTTCTTCT | |
| | alpha 2 | TTTTTAACTGAAAGCTGAATCCTTCCATTTCTTC | |
| | | TGCACATCTACTTGCTTAAATTGTGGGCAAAAG | |
| | | AGAAAAAGAAGGATTGATCAGAGCATTGTGCA | |
| | | ATACAGTTTCATTAACTCCTTCCCCCGCTCCCCC | |
| | | AAAAATTTGAATTTTTTTTTCAACACTCTTACAC | |
| | | CTGTTATGGAAAATGTCAACCTTTGTAAGAAAA | |
| | | CCAAAATAAAAATTGAAAAATAAAAACCATAA | |
| | | ACATTTGCACCACTTGTGGCTTTTGAATATCTTC | |
| | | CACAGAGGGAAGTTTAAAACCCAAACTTCCAA | |
| | | AGGTTTAAACTACCTCAAAACACTTTCCCATGA | |
| | | GTGTGATCCACATTGTTAGGTGCTGACCTAGAC | |
| | | AGAGATGAACTGAGGTCCTTGTTTTGTTTTGTTC | |
| | | ATAATACAAAGGTGCTAATTAATAGTATTTCAG | |
| | | ATACTTGAAGAATGTTGATGGTGCTAGAAGAAT | |
| | | TTGAGAAGAAATACTCCTGTATTGAGTTGTATC | |
| | | GTGTGGTGTATTTTTTAAAAAATTTGATTTAGCA | |
| | | TTCATATTTTCCATCTTATTCCCAATTAAAAGTA | |
| | | TGCAGATTATTTGCCCAAATCTTCTTCAGATTCA | |
| | | GCATTTGTTCTTTGCCAGTCTCATTTTCATCTTC | |
| | | TTCCATGGTTCCACAGAAGCTTTGTTTCTTGGGC | |
| | | AAGCAGAAAAATTAAATTGTACCTATTTTGTAT | |
| | | ATGTGAGATGTTTAAATAAATTGTGAAAAAAAT | |
| | | GAAATAAAGCATGTTTGGTTTTCCAAAAGAACA | |
| | | TAT | |
| 3UTR-008 | Col6a2; | CGCCGCCGCCCGGGCCCCGCAGTCGAGGGTCGT | 13 |
| | collagen, type | GAGCCCACCCCGTCCATGGTGCTAAGCGGGCCC | |
| | VI, alpha 2 | GGGTCCCACACGGCCAGCACCGCTGCTCACTCG | |
| | | GACGACGCCCTGGGCCTGCACCTCTCCAGCTCC | |
| | | TCCCACGGGGTCCCCGTAGCCCCGGCCCCCGCC | |
| | | CAGCCCCAGGTCTCCCCAGGCCCTCCGCAGGCT | |
| | | GCCCGGCCTCCCTCCCCCTGCAGCCATCCCAAG | |
| | | GCTCCTGACCTACCTGGCCCCTGAGCTCTGGAG | |
| | | CAAGCCCTGACCCAATAAAGGCTTTGAACCCAT | |
| 3UTR-009 | RPN1; | GGGGCTAGAGCCCTCTCCGCACAGCGTGGAGA | 14 |
| | ribophorin I | CGGGGCAAGGAGGGGGGTTATTAGGATTGGTG | |
| | | GTTTTGTTTTGCTTTGTTTAAAGCCGTGGGAAAA | |
| | | TGGCACAACTTTACCTCTGTGGGAGATGCAACA | |
| | | CTGAGAGCCAAGGGGTGGGAGTTGGGATAATT | |
| | | TTTATATAAAAGAAGTTTTTCCACTTTGAATTGC | |
| | | TAAAAGTGGCATTTTTCCTATGTGCAGTCACTC | |
| | | CTCTCATTTCTAAAATAGGGACGTGGCCAGGCA | |
| | | CGGTGGCTCATGCCTGTAATCCCAGCACTTTGG | |
| | | GAGGCCGAGGCAGGCGGCTCACGAGGTCAGGA | |
| | | GATCGAGACTATCCTGGCTAACACGGTAAAACC | |
| | | CTGTCTCTACTAAAAGTACAAAAAATTAGCTGG | |
| | | GCGTGGTGGTGGGCACCTGTAGTCCCAGCTACT | |
| | | CGGGAGGCTGAGGCAGGAGAAAGGCATGAATC | |
| | | CAAGAGGCAGAGCTTGCAGTGAGCTGAGATCA | |
| | | CGCCATTGCACTCCAGCCTGGGCAACAGTGTTA | |
| | | AGACTCTGTCTCAAATATAAATAAATAAATAAA | |
| | | TAAATAAATAAATAAATAAAAATAAAGCGAGA | |
| | | TGTTGCCCTCAAA | |
| 3UTR-010 | LRP1; low | GGCCCTGCCCCGTCGGACTGCCCCCAGAAAGCC | 15 |
| | density | TCCTGCCCCCTGCCAGTGAAGTCCTTCAGTGAG | |
| | lipoprotein | CCCCTCCCCAGCCAGCCCTTCCCTGGCCCCGCC | |
| | receptor related | GGATGTATAAATGTAAAAATGAAGGAATTACA | |
| | protein 1 | TTTTATATGTGAGCGAGCAAGCCGGCAAGCGAG | |
| | | CACAGTATTATTTCTCCATCCCCTCCCTGCCTGC | |
| | | TCCTTGGCACCCCCATGCTGCCTTCAGGGAGAC | |
| | | AGGCAGGGAGGGCTTGGGGCTGCACCTCCTACC | |
| | | CTCCCACCAGAACGCACCCCACTGGGAGAGCTG | |
| | | GTGGTGCAGCCTTCCCCTCCCTGTATAAGACAC | |
| | | TTTGCCAAGGCTCTCCCCTCTCGCCCCATCCCTG | |
| | | CTTGCCCGCTCCCACAGCTTCCTGAGGGCTAAT | |
| | | TCTGGGAAGGGAGAGTTCTTTGCTGCCCCTGTC | |
| | | TGGAAGACGTGGCTCTGGGTGAGGTAGGCGGG | |
| | | AAAGGATGGAGTGTTTTAGTTCTTGGGGGAGGC | |
| | | CACCCCAAACCCCAGCCCCAACTCCAGGGGCAC | |
| | | CTATGAGATGGCCATGCTCAACCCCCCTCCCAG | |
| | | ACAGGCCCTCCCTGTCTCCAGGGCCCCCACCGA | |
| | | GGTTCCCAGGGCTGGAGACTTCCTCTGGTAAAC | |
| | | ATTCCTCCAGCCTCCCCTCCCCTGGGGACGCCA | |
| | | AGGAGGTGGGCCACACCCAGGAAGGGAAAGCG | |
| | | GGCAGCCCCGTTTTGGGGACGTGAACGTTTTAA | |
| | | TAATTTTTGCTGAATTCCTTTACAACTAAATAAC | |
| | | ACAGATATTGTTATAAATAAAATTGT | |
| 3UTR-011 | NntI; | ATATTAAGGATCAAGCTGTTAGCTAATAATGCC | 16 |
| | cardiotrophin- | ACCTCTGCAGTTTTGGGAACAGGCAAATAAAGT | |
| | like cytokine | ATCAGTATACATGGTGATGTACATCTGTAGCAA | |
| | factor 1 | AGCTCTTGGAGAAAATGAAGACTGAAGAAAGC | |
| | | AAAGCAAAAACTGTATAGAGAGATTTTTCAAA | |
| | | AGCAGTAATCCCTCAATTTTAAAAAAGGATTGA | |
| | | AAATTCTAAATGTCTTTCTGTGCATATTTTTTGT | |
| | | GTTAGGAATCAAAAGTATTTTATAAAAGGAGA | |
| | | AAGAACAGCCTCATTTTAGATGTAGTCCTGTTG | |
| | | GATTTTTTATGCCTCCTCAGTAACCAGAAATGTT | |
| | | TTAAAAAACTAAGTGTTTAGGATTTCAAGACAA | |
| | | CATTATACATGGCTCTGAAATATCTGACACAAT | |
| | | GTAAACATTGCAGGCACCTGCATTTTATGTTTTT | |
| | | TTTTTCAACAAATGTGACTAATTTGAAACTTTTA | |
| | | TGAACTTCTGAGCTGTCCCCTTGCAATTCAACC | |
| | | GCAGTTTGAATTAATCATATCAAATCAGTTTTA | |
| | | ATTTTTTAAATTGTACTTCAGAGTCTATATTTCA | |
| | | AGGGCACATTTTCTCACTACTATTTTAATACATT | |
| | | AAAGGACTAAATAATCTTTCAGAGATGCTGGAA | |
| | | ACAAATCATTTGCTTTATATGTTTCATTAGAATA | |
| | | CCAATGAAACATACAACTTGAAAATTAGTAATA | |
| | | GTATTTTTGAAGATCCCATTTCTAATTGGAGATC | |
| | | TCTTTAATTTCGATCAACTTATAATGTGTAGTAC | |
| | | TATATTAAGTGCACTTGAGTGGAATTCAACATT | |
| | | TGACTAATAAAATGAGTTCATCATGTTGGCAAG | |
| | | TGATGTGGCAATTATCTCTGGTGACAAAAGAGT | |
| | | AAAATCAAATATTTCTGCCTGTTACAAATATCA | |
| | | AGGAAGACCTGCTACTATGAAATAGATGACATT | |
| | | AATCTGTCTTCACTGTTTATAATACGGATGGATT | |
| | | TTTTTTCAAATCAGTGTGTGTTTTGAGGTCTTAT | |
| | | GTAATTGATGACATTTGAGAGAAATGGTGGCTT | |
| | | TTTTTAGCTACCTCTTTGTTCATTTAAGCACCAG | |
| | | TAAAGATCATGTCTTTTTATAGAAGTGTAGATT | |
| | | TTCTTTGTGACTTTGCTATCGTGCCTAAAGCTCT | |
| | | AAATATAGGTGAATGTGTGATGAATACTCAGAT | |
| | | TATTTGTCTCTCTATATAATTAGTTTGGTACTAA | |
| | | GTTTCTCAAAAAATTATTAACACATGAAAGACA | |
| | | ATCTCTAAACCAGAAAAAGAAGTAGTACAAAT | |
| | | TTTGTTACTGTAATGCTCGCGTTTAGTGAGTTTA | |
| | | AAACACACAGTATCTTTTGGTTTTATAATCAGTT | |
| | | TCTATTTTGCTGTGCCTGAGATTAAGATCTGTGT | |
| | | ATGTGTGTGTGTGTGTGTGTGCGTTTGTGTGTTA | |
| | | AAGCAGAAAAGACTTTTTTAAAAGTTTTAAGTG | |
| | | ATAAATGCAATTTGTTAATTGATCTTAGATCAC | |
| | | TAGTAAACTCAGGGCTGAATTATACCATGTATA | |
| | | TTCTATTAGAAGAAAGTAAACACCATCTTTATT | |
| | | CCTGCCCTTTTTCTTCTCTCAAAGTAGTTGTAGT | |
| | | TATATCTAGAAAGAAGCAATTTTGATTTCTTGA | |
| | | AAAGGTAGTTCCTGCACTCAGTTTAAACTAAAA | |
| | | ATAATCATACTTGGATTTTATTTATTTTTGTCAT | |
| | | AGTAAAAATTTTAATTTATATATATTTTTATTTA | |
| | | GTATTATCTTATTCTTTGCTATTTGCCAATCCTT | |
| | | TGTCATCAATTGTGTTAAATGAATTGAAAATTC | |
| | | ATGCCCTGTTCATTTTATTTTACTTTATTGGTTA | |
| | | GGATATTTAAAGGATTTTTGTATATATAATTTCT | |
| | | TAAATTAATATTCCAAAAGGTTAGTGGACTTAG | |
| | | ATTATAAATTATGGCAAAAATCTAAAAACAACA | |
| | | AAAATGATTTTTATACATTCTATTTCATTATTCC | |
| | | TCTTTTTCCAATAAGTCATACAATTGGTAGATAT | |
| | | GACTTATTTTATTTTTGTATTATTCACTATATCTT | |
| | | TATGATATTTAAGTATAAATAATTAAAAAAATT | |
| | | TATTGTACCTTATAGTCTGTCACCAAAAAAAAA | |
| | | AAATTATCTGTAGGTAGTGAAATGCTAATGTTG | |
| | | ATTTGTCTTTAAGGGCTTGTTAACTATCCTTTAT | |
| | | TTTCTCATTTGTCTTAAATTAGGAGTTTGTGTTT | |
| | | AAATTACTCATCTAAGCAAAAAATGTATATAAA | |
| | | TCCCATTACTGGGTATATACCCAAAGGATTATA | |
| | | AATCATGCTGCTATAAAGACACATGCACACGTA | |
| | | TGTTTATTGCAGCACTATTCACAATAGCAAAGA | |
| | | CTTGGAACCAACCCAAATGTCCATCAATGATAG | |
| | | ACTTGATTAAGAAAATGTGCACATATACACCAT | |
| | | GGAATACTATGCAGCCATAAAAAAGGATGAGT | |
| | | TCATGTCCTTTGTAGGGACATGGATAAAGCTGG | |
| | | AAACCATCATTCTGAGCAAACTATTGCAAGGAC | |
| | | AGAAAACCAAACACTGCATGTTCTCACTCATAG | |
| | | GTGGGAATTGAACAATGAGAACACTTGGACAC | |
| | | AAGGTGGGGAACACCACACACCAGGGCCTGTC | |
| | | ATGGGGTGGGGGGAGTGGGGAGGGATAGCATT | |
| | | AGGAGATATACCTAATGTAAATGATGAGTTAAT | |
| | | GGGTGCAGCACACCAACATGGCACATGTATAC | |
| | | ATATGTAGCAAACCTGCACGTTGTGCACATGTA | |
| | | CCCTAGAACTTAAAGTATAATTAAAAAAAAAA | |
| | | AGAAAACAGAAGCTATTTATAAAGAAGTTATTT | |
| | | GCTGAAATAAATGTGATCTTTCCCATTAAAAAA | |
| | | ATAAAGAAATTTTGGGGTAAAAAAACACAATA | |
| | | TATTGTATTCTTGAAAAATTCTAAGAGAGTGGA | |
| | | TGTGAAGTGTTCTCACCACAAAAGTGATAACTA | |
| | | ATTGAGGTAATGCACATATTAATTAGAAAGATT | |
| | | TTGTCATTCCACAATGTATATATACTTAAAAAT | |
| | | ATGTTATACACAATAAATACATACATTAAAAAA | |
| | | TAAGTAAATGTA | |
| 3UTR-012 | Col6a1; | CCCACCCTGCACGCCGGCACCAAACCCTGTCCT | 17 |
| | collagen, type | CCCACCCCTCCCCACTCATCACTAAACAGAGTA | |
| | VI, alpha 1 | AAATGTGATGCGAATTTTCCCGACCAACCTGAT | |
| | | TCGCTAGATTTTTTTTAAGGAAAAGCTTGGAAA | |
| | | GCCAGGACACAACGCTGCTGCCTGCTTTGTGCA | |
| | | GGGTCCTCCGGGGCTCAGCCCTGAGTTGGCATC | |
| | | ACCTGCGCAGGGCCCTCTGGGGCTCAGCCCTGA | |
| | | GCTAGTGTCACCTGCACAGGGCCCTCTGAGGCT | |
| | | CAGCCCTGAGCTGGCGTCACCTGTGCAGGGCCC | |
| | | TCTGGGGCTCAGCCCTGAGCTGGCCTCACCTGG | |
| | | GTTCCCCACCCCGGGCTCTCCTGCCCTGCCCTCC | |
| | | TGCCCGCCCTCCCTCCTGCCTGCGCAGCTCCTTC | |
| | | CCTAGGCACCTCTGTGCTGCATCCCACCAGCCT | |
| | | GAGCAAGACGCCCTCTCGGGGCCTGTGCCGCAC | |
| | | TAGCCTCCCTCTCCTCTGTCCCCATAGCTGGTTT | |
| | | TTCCCACCAATCCTCACCTAACAGTTACTTTACA | |
| | | ATTAAACTCAAAGCAAGCTCTTCTCCTCAGCTT | |
| | | GGGGCAGCCATTGGCCTCTGTCTCGTTTTGGGA | |
| | | AACCAAGGTCAGGAGGCCGTTGCAGACATAAA | |
| | | TCTCGGCGACTCGGCCCCGTCTCCTGAGGGTCC | |
| | | TGCTGGTGACCGGCCTGGACCTTGGCCCTACAG | |
| | | CCCTGGAGGCCGCTGCTGACCAGCACTGACCCC | |
| | | GACCTCAGAGAGTACTCGCAGGGGCGCTGGCT | |
| | | GCACTCAAGACCCTCGAGATTAACGGTGCTAAC | |
| | | CCCGTCTGCTCCTCCCTCCCGCAGAGACTGGGG | |
| | | CCTGGACTGGACATGAGAGCCCCTTGGTGCCAC | |
| | | AGAGGGCTGTGTCTTACTAGAAACAACGCAAA | |
| | | CCTCTCCTTCCTCAGAATAGTGATGTGTTCGAC | |
| | | GTTTTATCAAAGGCCCCCTTTCTATGTTCATGTT | |
| | | AGTTTTGCTCCTTCTGTGTTTTTTTCTGAACCAT | |
| | | ATCCATGTTGCTGACTTTTCCAAATAAAGGTTTT | |
| | | CACTCCTCTC | |
| 3UTR-013 | Calr; calreticulin | AGAGGCCTGCCTCCAGGGCTGGACTGAGGCCTG | 18 |
| | | AGCGCTCCTGCCGCAGAGCTGGCCGCGCCAAAT | |
| | | AATGTCTCTGTGAGACTCGAGAACTTTCATTTTT | |
| | | TTCCAGGCTGGTTCGGATTTGGGGTGGATTTTG | |
| | | GTTTTGTTCCCCTCCTCCACTCTCCCCCACCCCC | |
| | | TCCCCGCCCTTTTTTTTTTTTTTTTTTAAACTGGT | |
| | | ATTTTATCTTTGATTCTCCTTCAGCCCTCACCCC | |
| | | TGGTTCTCATCTTTCTTGATCAACATCTTTTCTT | |
| | | GCCTCTGTCCCCTTCTCTCATCTCTTAGCTCCCC | |
| | | TCCAACCTGGGGGGCAGTGGTGTGGAGAAGCC | |
| | | ACAGGCCTGAGATTTCATCTGCTCTCCTTCCTGG | |
| | | AGCCCAGAGGAGGGCAGCAGAAGGGGGTGGTG | |
| | | TCTCCAACCCCCCAGCACTGAGGAAGAACGGG | |
| | | GCTCTTCTCATTTCACCCCTCCCTTTCTCCCCTG | |
| | | CCCCCAGGACTGGGCCACTTCTGGGTGGGGCAG | |
| | | TGGGTCCCAGATTGGCTCACACTGAGAATGTAA | |
| | | GAACTACAAACAAAATTTCTATTAAATTAAATT | |
| | | TTGTGTCTCC | |
| 3UTR-014 | Col1a1; | CTCCCTCCATCCCAACCTGGCTCCCTCCCACCCA | 19 |
| | collagen, type I, | ACCAACTTTCCCCCCAACCCGGAAACAGACAAG | |
| | alpha 1 | CAACCCAAACTGAACCCCCTCAAAAGCCAAAA | |
| | | AATGGGAGACAATTTCACATGGACTTTGGAAAA | |
| | | TATTTTTTTCCTTTGCATTCATCTCTCAAACTTA | |
| | | GTTTTTATCTTTGACCAACCGAACATGACCAAA | |
| | | AACCAAAAGTGCATTCAACCTTACCAAAAAAA | |
| | | AAAAAAAAAAAAGAATAAATAAATAACTTTTT | |
| | | AAAAAAGGAAGCTTGGTCCACTTGCTTGAAGAC | |
| | | CCATGCGGGGGTAAGTCCCTTTCTGCCCGTTGG | |
| | | GCTTATGAAACCCCAATGCTGCCCTTTCTGCTCC | |
| | | TTTCTCCACACCCCCCTTGGGGCCTCCCCTCCAC | |
| | | TCCTTCCCAAATCTGTCTCCCCAGAAGACACAG | |
| | | GAAACAATGTATTGTCTGCCCAGCAATCAAAGG | |
| | | CAATGCTCAAACACCCAAGTGGCCCCCACCCTC | |
| | | AGCCCGCTCCTGCCCGCCCAGCACCCCCAGGCC | |
| | | CTGGGGGACCTGGGGTTCTCAGACTGCCAAAGA | |
| | | AGCCTTGCCATCTGGCGCTCCCATGGCTCTTGC | |
| | | AACATCTCCCCTTCGTTTTTGAGGGGGTCATGC | |
| | | CGGGGGAGCCACCAGCCCCTCACTGGGTTCGGA | |
| | | GGAGAGTCAGGAAGGGCCACGACAAAGCAGAA | |
| | | ACATCGGATTTGGGGAACGCGTGTCAATCCCTT | |
| | | GTGCCGCAGGGCTGGGCGGGAGAGACTGTTCT | |
| | | GTTCCTTGTGTAACTGTGTTGCTGAAAGACTAC | |
| | | CTCGTTCTTGTCTTGATGTGTCACCGGGGCAACT | |
| | | GCCTGGGGGCGGGGATGGGGGCAGGGTGGAAG | |
| | | CGGCTCCCCATTTTATACCAAAGGTGCTACATC | |
| | | TATGTGATGGGTGGGGTGGGGAGGGAATCACT | |
| | | GGTGCTATAGAAATTGAGATGCCCCCCCAGGCC | |
| | | AGCAAATGTTCCTTTTTGTTCAAAGTCTATTTTT | |
| | | ATTCCTTGATATTTTTCTTTTTTTTTTTTTTTTTTT | |
| | | GTGGATGGGGACTTGTGAATTTTTCTAAAGGTG | |
| | | CTATTTAACATGGGAGGAGAGCGTGTGCGGCTC | |
| | | CAGCCCAGCCCGCTGCTCACTTTCCACCCTCTCT | |
| | | CCACCTGCCTCTGGCTTCTCAGGCCTCTGCTCTC | |
| | | CGACCTCTCTCCTCTGAAACCCTCCTCCACAGCT | |
| | | GCAGCCCATCCTCCCGGCTCCCTCCTAGTCTGTC | |
| | | CTGCGTCCTCTGTCCCCGGGTTTCAGAGACAAC | |
| | | TTCCCAAAGCACAAAGCAGTTTTTCCCCCTAGG | |
| | | GGTGGGAGGAAGCAAAAGACTCTGTACCTATTT | |
| | | TGTATGTGTATAATAATTTGAGATGTTTTTAATT | |
| | | ATTTTGATTGCTGGAATAAAGCATGTGGAAATG | |
| | | ACCCAAACATAATCCGCAGTGGCCTCCTAATTT | |
| | | CCTTCTTTGGAGTTGGGGGAGGGGTAGACATGG | |
| | | GGAAGGGGCTTTGGGGTGATGGGCTTGCCTTCC | |
| | | ATTCCTGCCCTTTCCCTCCCCACTATTCTCTTCT | |
| | | AGATCCCTCCATAACCCCACTCCCCTTTCTCTCA | |
| | | CCCTTCTTATACCGCAAACCTTTCTACTTCCTCT | |
| | | TTCATTTTCTATTCTTGCAATTTCCTTGCACCTTT | |
| | | TCCAAATCCTCTTCTCCCCTGCAATACCATACA | |
| | | GGCAATCCACGTGCACAACACACACACACACTC | |
| | | TTCACATCTGGGGTTGTCCAAACCTCATACCCA | |
| | | CTCCCCTTCAAGCCCATCCACTCTCCACCCCCTG | |
| | | GATGCCCTGCACTTGGTGGCGGTGGGATGCTCA | |
| | | TGGATACTGGGAGGGTGAGGGGAGTGGAACCC | |
| | | GTGAGGAGGACCTGGGGGCCTCTCCTTGAACTG | |
| | | ACATGAAGGGTCATCTGGCCTCTGCTCCCTTCT | |
| | | CACCCACGCTGACCTCCTGCCGAAGGAGCAACG | |
| | | CAACAGGAGAGGGGTCTGCTGAGCCTGGCGAG | |
| | | GGTCTGGGAGGGACCAGGAGGAAGGCGTGCTC | |
| | | CCTGCTCGCTGTCCTGGCCCTGGGGGAGTGAGG | |
| | | GAGACAGACACCTGGGAGAGCTGTGGGGAAGG | |
| | | CACTCGCACCGTGCTCTTGGGAAGGAAGGAGA | |
| | | CCTGGCCCTGCTCACCACGGACTGGGTGCCTCG | |
| | | ACCTCCTGAATCCCCAGAACACAACCCCCCTGG | |
| | | GCTGGGGTGGTCTGGGGAACCATCGTGCCCCCG | |
| | | CCTCCCGCCTACTCCTTTTTAAGCTT | |
| 3UTR-015 | PlodI; | TTGGCCAGGCCTGACCCTCTTGGACCTTTCTTCT | 20 |
| | procollagen- | TTGCCGACAACCACTGCCCAGCAGCCTCTGGGA | |
| | lysine, 2- | CCTCGGGGTCCCAGGGAACCCAGTCCAGCCTCC | |
| | oxoglutarate 5- | TGGCTGTTGACTTCCCATTGCTCTTGGAGCCACC | |
| | dioxygenase 1 | AATCAAAGAGATTCAAAGAGATTCCTGCAGGC | |
| | | CAGAGGCGGAACACACCTTTATGGCTGGGGCTC | |
| | | TCCGTGGTGTTCTGGACCCAGCCCCTGGAGACA | |
| | | CCATTCACTTTTACTGCTTTGTAGTGACTCGTGC | |
| | | TCTCCAACCTGTCTTCCTGAAAAACCAAGGCCC | |
| | | CCTTCCCCCACCTCTTCCATGGGGTGAGACTTG | |
| | | AGCAGAACAGGGGCTTCCCCAAGTTGCCCAGA | |
| | | AAGACTGTCTGGGTGAGAAGCCATGGCCAGAG | |
| | | CTTCTCCCAGGCACAGGTGTTGCACCAGGGACT | |
| | | TCTGCTTCAAGTTTTGGGGTAAAGACACCTGGA | |
| | | TCAGACTCCAAGGGCTGCCCTGAGTCTGGGACT | |
| | | TCTGCCTCCATGGCTGGTCATGAGAGCAAACCG | |
| | | TAGTCCCCTGGAGACAGCGACTCCAGAGAACCT | |
| | | CTTGGGAGACAGAAGAGGCATCTGTGCACAGC | |
| | | TCGATCTTCTACTTGCCTGTGGGGAGGGGAGTG | |
| | | ACAGGTCCACACACCACACTGGGTCACCCTGTC | |
| | | CTGGATGCCTCTGAAGAGAGGGACAGACCGTC | |
| | | AGAAACTGGAGAGTTTCTATTAAAGGTCATTTA | |
| | | AACCA | |
| 3UTR-016 | Nucb1; | TCCTCCGGGACCCCAGCCCTCAGGATTCCTGAT | 21 |
| | nucleobindin 1 | GCTCCAAGGCGACTGATGGGCGCTGGATGAAG | |
| | | TGGCACAGTCAGCTTCCCTGGGGGCTGGTGTCA | |
| | | TGTTGGGCTCCTGGGGCGGGGGCACGGCCTGGC | |
| | | ATTTCACGCATTGCTGCCACCCCAGGTCCACCT | |
| | | GTCTCCACTTTCACAGCCTCCAAGTCTGTGGCTC | |
| | | TTCCCTTCTGTCCTCCGAGGGGCTTGCCTTCTCT | |
| | | CGTGTCCAGTGAGGTGCTCAGTGATCGGCTTAA | |
| | | CTTAGAGAAGCCCGCCCCCTCCCCTTCTCCGTCT | |
| | | GTCCCAAGAGGGTCTGCTCTGAGCCTGCGTTCC | |
| | | TAGGTGGCTCGGCCTCAGCTGCCTGGGTTGTGG | |
| | | CCGCCCTAGCATCCTGTATGCCCACAGCTACTG | |
| | | GAATCCCCGCTGCTGCTCCGGGCCAAGCTTCTG | |
| | | GTTGATTAATGAGGGCATGGGGTGGTCCCTCAA | |
| | | GACCTTCCCCTACCTTTTGTGGAACCAGTGATG | |
| | | CCTCAAAGACAGTGTCCCCTCCACAGCTGGGTG | |
| | | CCAGGGGCAGGGGATCCTCAGTATAGCCGGTG | |
| | | AACCCTGATACCAGGAGCCTGGGCCTCCCTGAA | |
| | | CCCCTGGCTTCCAGCCATCTCATCGCCAGCCTC | |
| | | CTCCTGGACCTCTTGGCCCCCAGCCCCTTCCCCA | |
| | | CACAGCCCCAGAAGGGTCCCAGAGCTGACCCC | |
| | | ACTCCAGGACCTAGGCCCAGCCCCTCAGCCTCA | |
| | | TCTGGAGCCCCTGAAGACCAGTCCCACCCACCT | |
| | | TTCTGGCCTCATCTGACACTGCTCCGCATCCTGC | |
| | | TGTGTGTCCTGTTCCATGTTCCGGTTCCATCCAA | |
| | | ATACACTTTCTGGAACAAA | |

[0170] It should be understood that those listed in the previous tables are examples and that any UTR from any gene may be incorporated into the respective first or second flanking region of the primary construct. Furthermore, multiple wild-type UTRs of any known gene may be utilized. It is also within the scope of the present invention to provide artificial UTRs which are not variants of wild type genes. These UTRs or portions thereof may be placed in the same orientation as in the transcript from which they were selected or may be altered in orientation or location. Hence a 5′ or 3′ UTR may be inverted, shortened, lengthened, made chimeric with one or more other 5′ UTRs or 3′ UTRs. As used herein, the term “altered” as it relates to a UTR sequence, means that the UTR has been changed in some way in relation to a reference sequence. For example, a 3′ or 5′ UTR may be altered relative to a wild type or native UTR by the change in orientation or location as taught above or may be altered by the inclusion of additional nucleotides, deletion of nucleotides, swapping or transposition of nucleotides. Any of these changes producing an “altered” UTR (whether 3′ or 5′) comprise a variant UTR.

[0171] In one embodiment, the polynucleotides, primary constructs and/or mmRNA of the present invention may have a heterologous UTR. As used herein “heterologous UTRs” are those UTRs which are not naturally found with the coding region encoded on the same or instant polynucleotide, primary construct or mmRNA. As a non-limiting example, the first flanking region may comprise a heterologous UTR. As another non-limiting example, the second flanking region may comprise a heterologous UTR. As yet another non-limiting example, the first and second flanking regions may each comprise a heterologous UTR. The heterologous UTR in the first flanking region may be derived from the same species or a different species than the heterologous UTR in the second flanking region.

[0172] In one embodiment, the polynucleotides, primary constructs and/or mmRNA of the present invention may have a heterologous UTR which is not derived from the beta-globin gene. As a non-limiting example, the heterologous UTR may be a 5′UTR and is not derived from the beta-globin gene. As another non-limiting example, the heterologous UTR may be a 3′UTR and is not derived from the beta-globin gene.

[0173] In one embodiment, the polynucleotides, primary constructs and/or mmRNA of the present invention comprise a heterologous 5′UTR with the proviso that the heterologous 5′UTR is not derived from the beta-globin gene.

[0174] In one embodiment, the polynucleotides, primary constructs and/or mmRNA of the present invention comprise a heterologous 3′UTR with the proviso that the heterologous 3′UTR is not derived from the beta-globin gene.

[0175] In one embodiment, the polynucleotides, primary constructs and/or mmRNA of the present invention may have a homologous UTRs. As used herein “homogolous UTRs” are those UTRs which are naturally found associated with the coding region of the mRNA, such as the wild type UTR. As a non-limiting example, the first flanking region may comprise a homogolous UTR. As another non-limiting example, the second flanking region may comprise a homogolous UTR. As yet another non-limiting example, the first and second flanking regions may each comprise a homogolous UTR.

[0176] In one embodiment, the polynucleotides, primary constructs and/or mmRNA of the present invention may have a heterologous UTR in the first flanking region and a homologous UTR in the second flanking region.

[0177] In another embodiment, the polynucleotides, primary constructs and/or mmRNA of the present invention may have a homologous UTR in the first flanking region and a heterologous UTR in the second flanking region.

[0178] In one embodiment, a double, triple or quadruple UTR such as a 5′ or 3′ UTR may be used. As used herein, a “double” UTR is one in which two copies of the same UTR are encoded either in series or substantially in series. For example, a double beta-globin 3′ UTR may be used as described in US Patent publication 20100129877, the contents of which are incorporated herein by reference in its entirety.

[0179] It is also within the scope of the present invention to have patterned UTRs. As used herein “patterned UTRs” are those UTRs which reflect a repeating or alternating pattern, such as, but not limited to, AB, ABA, ABAB, ABABA, ABABAB, AAB, AABB, AABBA, AABBAA, AABBAAB, AABBAABB, AABBAABBA, ABB, ABBA, AABBAABBAABB, ABC, ABCA, ABCAB, ABCABC, ABCABCA, ABCABCAB, ABCABCABC, ABCB, ABCBC, ABCBCA, ABCC, ABCCB, ABCCBA, or variants thereof repeated once, twice, or more than 3 times. In these patterns, each letter, A, B, or C represent a different UTR at the nucleotide level. The different UTRs represented in each pattern may be derived from the same species or they may be derived from different species.

[0180] In one embodiment, the flanking regions may comprise patterned UTRs. In one embodiment, the first flanking region and the second flanking region may each comprise a patterned UTR. The pattern for each UTR may be the same or different. As a non-limiting example, the patterned UTR in first flanking region is different than the patterned UTR in the second flanking region. As another non-limiting example, the patterned UTR in the first flanking region and the second flanking region may be the same.

[0181] In one embodiment, the flanking regions may comprise patterned UTRs derived from the same species. As a non-limiting example, the patterned UTR in the first flanking region may be derived from the same species as the patterned UTR in the second flanking region, but the patterned UTR in the first flanking region is different from the patterned UTR in the second flanking region.

[0182] In one embodiment, the first flanking region may comprise a patterned UTR derived from a first species and the second flanking region may comprise a patterned UTR derived from a second species.

[0183] In another embodiment, the flanking regions may comprise patterned UTRs derived from different species.

[0184] In one embodiment, the patterned UTR may comprise heterologous and homologous UTRs. As a non-limiting example, the first flanking region may comprise heterologous UTRs and the second flanking region may comprise homologous UTRs.

[0185] In one embodiment, flanking regions are selected from a family of transcripts whose proteins share a common function, structure, feature of property. For example, polypeptides of interest may belong to a family of proteins which are expressed in a particular cell, tissue or at some time during development. The UTRs from any of these genes may be swapped for any other UTR of the same or different family of proteins to create a new chimeric primary transcript. As used herein, a “family of proteins” is used in the broadest sense to refer to a group of two or more polypeptides of interest which share at least one function, structure, feature, localization, origin, or expression pattern.

[0186] After optimization (if desired), the primary construct components are reconstituted and transformed into a vector such as, but not limited to, plasmids, viruses, cosmids, and artificial chromosomes. For example, the optimized construct may be reconstituted and transformed into chemically competent E. coli, yeast, neurospora, maize, drosophila, etc. where high copy plasmid-like or chromosome structures occur by methods described herein. Stop Codons

[0187] In one embodiment, the primary constructs of the present invention may include at least two stop codons before the 3′ untranslated region (UTR). The stop codon may be selected from TGA, TAA and TAG. In one embodiment, the primary constructs of the present invention include the stop codon TGA and one additional stop codon. In a further embodiment the addition stop codon may be TAA.

### Vector Amplification

[0188] The vector containing the primary construct is then amplified and the plasmid isolated and purified using methods known in the art such as, but not limited to, a maxi prep using the Invitrogen PURELINK™ HiPure Maxiprep Kit (Carlsbad, Calif.).

### Plasmid Linearization

[0189] The plasmid may then be linearized using methods known in the art such as, but not limited to, the use of restriction enzymes and buffers. The linearization reaction may be purified using methods including, for example Invitrogen's PURELINK™ PCR Micro Kit (Carlsbad, Calif.), and HPLC based purification methods such as, but not limited to, strong anion exchange HPLC, weak anion exchange HPLC, reverse phase HPLC (RP-HPLC), and hydrophobic interaction HPLC (HIC-HPLC) and Invitrogen's standard PURELINK™ PCR Kit (Carlsbad, Calif.). The purification method may be modified depending on the size of the linearization reaction which was conducted. The linearized plasmid is then used to generate cDNA for in vitro transcription (IVT) reactions.

cDNA Template Synthesis

[0190] A cDNA template may be synthesized by having a linearized plasmid undergo polymerase chain reaction (PCR). Table 4 is a listing of primers and probes that may be useful in the PCR reactions of the present invention. It should be understood that the listing is not exhaustive and that primer-probe design for any amplification is within the skill of those in the art. Probes may also contain chemically modified bases to increase base-pairing fidelity to the target molecule and base-pairing strength. Such modifications may include 5-methyl-Cytidine, 2,6-di-amino-purine, 2′-fluoro, phosphoro-thioate, or locked nucleic acids.

TABLE 4
Primers and Probes

| Primer/ | | | |
|---|---|---|---|
| Probe | | | SEQ |
| Identi- | | Hybridization | ID |
| fier | Sequence (5′-3′) | target | NO. |
| UFP | TTGGACCCTCGTACAGAAGCTAA | cDNA Template | 22 |
| | TACG | | |
| URP | Tₓ₁₆₀CTTCCTACTCAGGCTTTATT | cDNA Template | 23 |
| | CAAAGACCA | | |
| GBA1 | CCTTGACCTTCTGGAACTTC | Acid | 24 |
| | | glucocere- | |
| | | brosidase | |
| GBA2 | CCAAGCACTGAAACGGATAT | Acid | 25 |
| | | glucocere- | |
| | | brosidase | |
| LUC1 | GATGAAAAGTGCTCCAAGGA | Luciferase | 26 |
| LUC2 | AACCGTGATGAAAAGGTACC | Luciferase | 27 |
| LUC3 | TCATGCAGATTGGAAAGGTC | Luciferase | 28 |
| GCSF1 | CTTCTTGGACTGTCCAGAGG | G-CSF | 29 |
| GCSF2 | GCAGTCCCTGATACAAGAAC | G-CSF | 30 |
| GCSF3 | GATTGAAGGTGGCTCGCTAC | G-CSF | 31 |

*UFP is universal forward primer; URP is universal reverse primer.

[0191] In one embodiment, the cDNA may be submitted for sequencing analysis before undergoing transcription.

### Polynucleotide Production

[0192] The process of polynucleotide production may include, but is not limited to, in vitro transcription, cDNA template removal and RNA clean-up, and capping and/or tailing reactions.

[0193] In Vitro Transcription

[0194] The cDNA produced in the previous step may be transcribed using an in vitro transcription (IVT) system. The system typically comprises a transcription buffer, nucleotide triphosphates (NTPs), an RNase inhibitor and a polymerase. The NTPs may be manufactured in house, may be selected from a supplier, or may be synthesized as described herein. The NTPs may be selected from, but are not limited to, those described herein including natural and unnatural (modified) NTPs. The polymerase may be selected from, but is not limited to, T7 RNA polymerase, T3 RNA polymerase and mutant polymerases such as, but not limited to, polymerases able to be incorporated into modified nucleic acids.

### RNA Polymerases

[0195] Any number of RNA polymerases or variants may be used in the design of the primary constructs of the present invention.

[0196] RNA polymerases may be modified by inserting or deleting amino acids of the RNA polymerase sequence. As a non-limiting example, the RNA polymerase may be modified to exhibit an increased ability to incorporate a 2′-modified nucleotide triphosphate compared to an unmodified RNA polymerase (see International Publication WO2008078180 and U.S. Pat. No. 8,101,385; herein incorporated by reference in their entireties).

[0197] Variants may be obtained by evolving an RNA polymerase, optimizing the RNA polymerase amino acid and/or nucleic acid sequence and/or by using other methods known in the art. As a non-limiting example, T7 RNA polymerase variants may be evolved using the continuous directed evolution system set out by Esvelt et al. (Nature (2011) 472(7344):499-503; herein incorporated by reference in its entirety) where clones of T7 RNA polymerase may encode at least one mutation such as, but not limited to, lysine at position 93 substituted for threonine (K93T), I4M, A7T, E63V, V64D, A65E, D66Y, T76N, C125R, S128R, A136T, N165S, G175R, H176L, Y178H, F182L, L196F, G198V, D208Y, E222K, S228A, Q239R, T243N, G259D, M267I, G280C, H300R, D351A, A354S, E356D, L360P, A383V, Y385C, D388Y, S397R, M401T, N410S, K450R, P451T, G452V, E484A, H523L, H524N, G542V, E565K, K577E, K577M, N601S, S684Y, L699I, K713E, N748D, Q754R, E775K, A827V, D851N or L864F. As another non-limiting example, T7 RNA polymerase variants may encode at least mutation as described in U.S. Pub. Nos. 20100120024 and 20070117112; herein incorporated by reference in their entireties. Variants of RNA polymerase may also include, but are not limited to, substitutional variants, conservative amino acid substitution, insertional variants, deletional variants and/or covalent derivatives.

[0198] In one embodiment, the primary construct may be designed to be recognized by the wild type or variant RNA polymerases. In doing so, primary construct may be modified to contain sites or regions of sequence changes from the wild type or parent primary construct.

[0199] In one embodiment, the primary construct may be designed to include at least one substitution and/or insertion upstream of an RNA polymerase binding or recognition site, downstream of the RNA polymerase binding or recognition site, upstream of the TATA box sequence, downstream of the TATA box sequence of the primary construct but upstream of the coding region of the primary construct, within the 5′UTR, before the 5′UTR and/or after the 5′UTR.

[0200] In one embodiment, the 5′UTR of the primary construct may be replaced by the insertion of at least one region and/or string of nucleotides of the same base. The region and/or string of nucleotides may include, but is not limited to, at least 3, at least 4, at least 5, at least 6, at least 7 or at least 8 nucleotides and the nucleotides may be natural and/or unnatural. As a non-limiting example, the group of nucleotides may include 5-8 adenine, cytosine, thymine, a string of any of the other nucleotides disclosed herein and/or combinations thereof.

[0201] In one embodiment, the 5′UTR of the primary construct may be replaced by the insertion of at least two regions and/or strings of nucleotides of two different bases such as, but not limited to, adenine, cytosine, thymine, any of the other nucleotides disclosed herein and/or combinations thereof. For example, the 5′UTR may be replaced by inserting 5-8 adenine bases followed by the insertion of 5-8 cytosine bases. In another example, the 5′UTR may be replaced by inserting 5-8 cytosine bases followed by the insertion of 5-8 adenine bases.

[0202] In one embodiment, the primary construct may include at least one substitution and/or insertion downstream of the transcription start site which may be recognized by an RNA polymerase. As a non-limiting example, at least one substitution and/or insertion may occur downstream the transcription start site by substituting at least one nucleic acid in the region just downstream of the transcription start site (such as, but not limited to, +1 to +6). Changes to region of nucleotides just downstream of the transcription start site may affect initiation rates, increase apparent nucleotide triphosphate (NTP) reaction constant values, and increase the dissociation of short transcripts from the transcription complex curing initial transcription (Brieba et al, Biochemistry (2002) 41: 5144-5149; herein incorporated by reference in its entirety). The modification, substitution and/or insertion of at least one nucleic acid may cause a silent mutation of the nucleic acid sequence or may cause a mutation in the amino acid sequence.

[0203] In one embodiment, the primary construct may include the substitution of at least 1, at least 2, at least 3, at least 4, at least 5, at least 6, at least 7, at least 8, at least 9, at least 10, at least 11, at least 12 or at least 13 guanine bases downstream of the transcription start site.

[0204] In one embodiment, the primary construct may include the substitution of at least 1, at least 2, at least 3, at least 4, at least 5 or at least 6 guanine bases in the region just downstream of the transcription start site. As a non-limiting example, if the nucleotides in the region are GGGAGA the guanine bases may be substituted by at least 1, at least 2, at least 3 or at least 4 adenine nucleotides. In another non-limiting example, if the nucleotides in the region are GGGAGA the guanine bases may be substituted by at least 1, at least 2, at least 3 or at least 4 cytosine bases. In another non-limiting example, if the nucleotides in the region are GGGAGA the guanine bases may be substituted by at least 1, at least 2, at least 3 or at least 4 thymine, and/or any of the nucleotides described herein.

[0205] In one embodiment, the primary construct may include at least one substitution and/or insertion upstream of the start codon. For the purpose of clarity, one of skill in the art would appreciate that the start codon is the first codon of the protein coding region whereas the transcription start site is the site where transcription begins. The primary construct may include, but is not limited to, at least 1, at least 2, at least 3, at least 4, at least 5, at least 6, at least 7 or at least 8 substitutions and/or insertions of nucleotide bases. The nucleotide bases may be inserted or substituted at 1, at least 1, at least 2, at least 3, at least 4 or at least 5 locations upstream of the start codon. The nucleotides inserted and/or substituted may be the same base (e.g., all A or all C or all T or all G), two different bases (e.g., A and C, A and T, or C and T), three different bases (e.g., A, C and T or A, C and T) or at least four different bases. As a non-limiting example, the guanine base upstream of the coding region in the primary construct may be substituted with adenine, cytosine, thymine, or any of the nucleotides described herein. In another non-limiting example the substitution of guanine bases in the primary construct may be designed so as to leave one guanine base in the region downstream of the transcription start site and before the start codon (see Esvelt et al. Nature (2011) 472(7344):499-503; herein incorporated by reference in its entirety). As a non-limiting example, at least 5 nucleotides may be inserted at 1 location downstream of the transcription start site but upstream of the start codon and the at least 5 nucleotides may be the same base type.

cDNA Template Removal and Clean-Up

[0206] The cDNA template may be removed using methods known in the art such as, but not limited to, treatment with Deoxyribonuclease I (DNase I). RNA clean-up may also include a purification method such as, but not limited to, AGENCOURT® CLEANSEQ® system from Beckman Coulter (Danvers, Mass.), HPLC based purification methods such as, but not limited to, strong anion exchange HPLC, weak anion exchange HPLC, reverse phase HPLC (RP-HPLC), and hydrophobic interaction HPLC (HIC-HPLC).

Capping and/or Tailing Reactions

[0207] The primary construct or mmRNA may also undergo capping and/or tailing reactions. A capping reaction may be performed by methods known in the art to add a 5′ cap to the 5′ end of the primary construct. Methods for capping include, but are not limited to, using a Vaccinia Capping enzyme (New England Biolabs, Ipswich, Mass.).

[0208] A poly-A tailing reaction may be performed by methods known in the art, such as, but not limited to, 2′ O-methyltransferase and by methods as described herein. If the primary construct generated from cDNA does not include a poly-T, it may be beneficial to perform the poly-A-tailing reaction before the primary construct is cleaned.

### Purification

[0209] The primary construct or mmRNA purification may include, but is not limited to, mRNA or mmRNA clean-up, quality assurance and quality control. mRNA or mmRNA clean-up may be performed by methods known in the arts such as, but not limited to, AGENCOURT® beads (Beckman Coulter Genomics, Danvers, Mass.), poly-T beads, LNA™ oligo-T capture probes (EXIQON® Inc, Vedbaek, Denmark) or HPLC based purification methods such as, but not limited to, strong anion exchange HPLC, weak anion exchange HPLC, reverse phase HPLC (RP-HPLC), and hydrophobic interaction HPLC (HIC-HPLC). The term “purified” when used in relation to a polynucleotide such as a “purified mRNA or mmRNA” refers to one that is separated from at least one contaminant. As used herein, a “contaminant” is any substance which makes another unfit, impure or inferior. Thus, a purified polynucleotide (e.g., DNA and RNA) is present in a form or setting different from that in which it is found in nature, or a form or setting different from that which existed prior to subjecting it to a treatment or purification method.

[0210] A quality assurance and/or quality control check may be conducted using methods such as, but not limited to, gel electrophoresis, UV absorbance, or analytical HPLC.

[0211] In another embodiment, the mRNA or mmRNA may be sequenced by methods including, but not limited to reverse-transcriptase-PCR.

[0212] In one embodiment, the mRNA or mmRNA may be quantified using methods such as, but not limited to, ultraviolet visible spectroscopy (UV/Vis). A non-limiting example of a UV/Vis spectrometer is a NANODROP® spectrometer (ThermoFisher, Waltham, Mass.). The quantified mRNA or mmRNA may be analyzed in order to determine if the mRNA or mmRNA may be of proper size, check that no degradation of the mRNA or mmRNA has occurred. Degradation of the mRNA and/or mmRNA may be checked by methods such as, but not limited to, agarose gel electrophoresis, HPLC based purification methods such as, but not limited to, strong anion exchange HPLC, weak anion exchange HPLC, reverse phase HPLC (RP-HPLC), and hydrophobic interaction HPLC (HIC-HPLC), liquid chromatography-mass spectrometry (LCMS), capillary electrophoresis (CE) and capillary gel electrophoresis (CGE).

### Signal Peptides or Proteins

[0213] The primary constructs or mmRNA may also encode additional features which facilitate trafficking of the polypeptides to therapeutically relevant sites. One such feature which aids in protein trafficking is the signal peptide sequence. As used herein, a “signal sequence” or “signal peptide” is a polynucleotide or polypeptide, respectively, which is from about 9 to 200 nucleotides (3-60 amino acids) in length which is incorporated at the 5′ (or N-terminus) of the coding region or polypeptide encoded, respectively. Addition of these sequences result in trafficking of the encoded polypeptide to the endoplasmic reticulum through one or more secretory pathways. Some signal peptides are cleaved from the protein by signal peptidase after the proteins are transported.

[0214] Table 5 is a representative listing of signal proteins or peptides which may be incorporated for encoding by the polynucleotides, primary constructs or mmRNA of the invention.

TABLE 5
Signal Peptides

| | | | SEQ | | SEQ |
|---|---|---|---|---|---|
| | | NUCLEOTIDE SEQUENCE | ID | ENCODED | ID |
| ID | Description | (5′-3′) | NO. | PEPTIDE | NO. |
| SS-001 | α-1- | ATGATGCCATCCTCAGTCTC | 32 | MMPSSVSWGIL | 94 |
| | antitrypsin | ATGGGGTATTTTGCTCTTGG | | LAGLCCLVPVS | |
| | | CGGGTCTGTGCTGTCTCGTG | | LA | |
| | | CCGGTGTCGCTCGCA | | | |
| SS-002 | G-CSF | ATGGCCGGACCGGCGACTC | 33 | MAGPATQSPM | 95 |
| | | AGTCGCCCATGAAACTCATG | | KLMALQLLLW | |
| | | GCCCTGCAGTTGTTGCTTTG | | HSALWTVQEA | |
| | | GCACTCAGCCCTCTGGACCG | | | |
| | | TCCAAGAGGCG | | | |
| SS-003 | Factor IX | ATGCAGAGAGTGAACATGA | 34 | MQRVNMIMAE | 96 |
| | | TTATGGCCGAGTCCCCATCG | | SPSLITICLLGY | |
| | | CTCATCACAATCTGCCTGCT | | LLSAECTVFLD | |
| | | TGGTACCTGCTTTCCGCCGA | | HENANKILNRP | |
| | | ATGCACTGTCTTTCTGGATC | | KR | |
| | | ACGAGAATGCGAATAAGAT | | | |
| | | CTTGAACCGACCCAAACGG | | | |
| SS-004 | Prolactin | ATGAAAGGATCATTGCTGTT | 35 | MKGSLLLLLVS | 97 |
| | | GCTCCTCGTGTCGAACCTTC | | NLLLCQSVAP | |
| | | TGCTTTGCCAGTCCGTAGCC | | | |
| | | CCC | | | |
| SS-005 | Albumin | ATGAAATGGGTGACGTTCAT | 36 | MKWVTFISLLF | 98 |
| | | CTCACTGTTGTTTTTGTTCTC | | LFSSAYSRG | |
| | | GTCCGCCTACTCCAGGGGAG | | VFRR | |
| | | TATTCCGCCGA | | | |
| SS-006 | HMMSP38 | ATGTGGTGGCGGCTCTGGTG | 37 | MWWRLWWLL | 99 |
| | | GCTGCTCCTGTTGCTCCTCTT | | LLLLLLPMWA | |
| | | GCTGTGGCCCATGGTGTGGG | | | |
| | | CA | | | |
| MLS- | ornithine | TGCTCTTTAACCTCCGCATC | 38 | MLFNLRILLNN | 100 |
| 001 | carbamoyl- | CTGTTGAATAACGCTGCGTT | | AAFRNGHNFM | |
| | transferase | CCGAAATGGGCATAACTTCA | | VRNFRCGQPLQ | |
| | | TGGTACGCAACTTCAGATGC | | | |
| | | GGCCAGCCACTCCAG | | | |
| MLS- | Cytochrome | ATGTCCGTCTTGACACCCCT | 39 | MSVLTPLLLRG | 101 |
| 002 | C Oxidase | GCTCTTGAGAGGGCTGACG | | LTGSARRLPVP | |
| | subunit 8A | GGGTCCGCTAGACGCCTGCC | | RAKIHSL | |
| | | GGTACCGCGAGCGAAGATC | | | |
| | | CACTCCCTG | | | |
| MLS- | Cytochrome | ATGAGCGTGCTCACTCCGTT | 40 | MSVLTPLLLRG | 102 |
| 003 | C Oxidase | GCTTCTTCGAGGGCTTACGG | | LTGSARRLPVP | |
| | subunit 8A | GATCGGCTCGGAGGTTGCCC | | RAKIHSL | |
| | | GTCCCGAGAGCGAAGATCC | | | |
| | | ATTCGTTG | | | |
| SS-007 | Type III, | TGACAAAAATAACTTTATCT | 41 | MVTKITLSPQN | 103 |
| | bacterial | CCCCAGAATTTTAGAATCCA | | FRIQKQETTLL | |
| | | AAAACAGGAAACCACACTA | | KEKSTEKNSLA | |
| | | CTAAAAGAAAAATCAACCG | | KSILAVKNHFIE | |
| | | AGAAAAATTCTTTAGCAAA | | LRSKLSERFISH | |
| | | AAGTATTCTCGCAGTAAAAA | | KNT | |
| | | TCACTTCATCGAATTAAGGT | | | |
| | | CAAAATTATCGGAACGTTTT | | | |
| | | ATTTCGCATAAGAACACT | | | |
| SS-008 | Viral | ATGCTGAGCTTTGTGGATAC | 42 | MLSFVDTRTLL | 104 |
| | | CCGCACCCTGCTGCTGCTGG | | LLAVTSCLATC | |
| | | CGGTGACCAGCTGCCTGGCG | | Q | |
| | | ACCTGCCAG | | | |
| SS-009 | viral | ATGGGCAGCAGCCAGGCGC | 43 | MGSSQAPRMG | 105 |
| | | CGCGCATGGGCAGCGTGGG | | SVGGHGLMAL | |
| | | CGGCCATGGCCTGATGGCGC | | LMAGLILPGILA | |
| | | TGCTGATGGCGGGCCTGATT | | | |
| | | CTGCCGGGCATTCTGGCG | | | |
| SS-010 | Viral | ATGGCGGGCATTTTTTATTT | 44 | MAGIFYFLFSFL | 106 |
| | | TCTGTTTAGCTTTCTGTTTGG | | FGICD | |
| | | CATTTGCGAT | | | |
| SS-011 | Viral | ATGGAAAACCGCCTGCTGC | 45 | MENRLLRVFLV | 107 |
| | | GCGTGTTTCTGGTGTGGGCG | | WAALTMDGAS | |
| | | GCGCTGACCATGGATGGCG | | A | |
| | | CGAGCGCG | | | |
| SS-012 | Viral | ATGGCGCGCCAGGGCTGCTT | 46 | MARQGCFGSY | 108 |
| | | TGGCAGCTATCAGGTGATTA | | QVISLFTFAIGV | |
| | | GCCTGTTTACCTTTGCGATT | | NLCLG | |
| | | GGCGTGAACCTGTGCCTGGG | | | |
| | | C | | | |
| SS-013 | Bacillus | ATGAGCCGCCTGCCGGTGCT | 47 | MSRLPVLLLLQ | 109 |
| | | GCTGCTGCTGCAGCTGCTGG | | LLVRPGLQ | |
| | | TGCGCCCGGGCCTGCAG | | | |
| SS-014 | Bacillus | ATGAAACAGCAGAAACGCC | 48 | MKQQKRLYAR | 110 |
| | | TGTATGCGCGCCTGCTGACC | | LLTLLFALIFLL | |
| | | CTGCTGTTTGCGCTGATTTTT | | PHSSASA | |
| | | CTGCTGCCGCATAGCAGCGC | | | |
| | | GAGCGCG | | | |
| SS-015 | Secretion | ATGGCGACGCCGCTGCCTCC | 49 | MATPLPPPSPR | 111 |
| | signal | GCCCTCCCCGCGGCACCTGC | | HLRLLRLLLSG | |
| | | GGCTGCTGCGGCTGCTGCTC | | | |
| | | TCCGCCCTCGTCCTCGGC | | | |
| SS-016 | Secretion | ATGAAGGCTCCGGGTCGGCT | 50 | MKAPGRLVLII | 112 |
| | signal | CGTGCTCATCATCCTGTGCT | | LCSVVFS | |
| | | CCGTGGTCTTCTCT | | | |
| SS-017 | Secretion | ATGCTTCAGCTTTGGAAACT | 51 | MLQLWKLLCG | 113 |
| | signal | TGTTCTCCTGTGCGGCGTGC | | VLT | |
| | | TCACT | | | |
| SS-018 | Secretion | ATGCTTTATCTCCAGGGTTG | 52 | MLYLQGWSMP | 114 |
| | signal | GAGCATGCCTGCTGTGGCA | | AVA | |
| SS-019 | Secretion | ATGGATAACGTGCAGCCGA | 53 | MDNVQPKIKH | 115 |
| | signal | AAATAAAACATCGCCCCTTC | | RPFCFSVKGHV | |
| | | TGCTTCAGTGTGAAAGGCCA | | KMLRLDIINSL | |
| | | CGTGAAGATGCTGCGGCTG | | VTTVFMLIVSV | |
| | | GATATTATCAACTCACTGGT | | LALIP | |
| | | AACAACAGTATTCATGCTCA | | | |
| | | TCGTATCTGTGTTGGCACTG | | | |
| | | ATACCA | | | |
| SS-020 | Secretion | ATGCCCTGCCTAGACCAACA | 54 | MPCLDQQLTV | 116 |
| | signal | GCTCACTGTTCATGCCCTAC | | HALPCPAQPSS | |
| | | CCTGCCCTGCCCAGCCCTCC | | LAFCQVGFLTA | |
| | | TCTCTGGCCTTCTGCCAAGT | | | |
| | | GGGGTTCTTAACAGCA | | | |
| SS-021 | Secretion | ATGAAAACCTTGTTCAATCC | 55 | MKTLFNPAPAI | 117 |
| | signal | AGCCCCTGCCATTGCTGACC | | ADLDPQFYTLS | |
| | | TGGATCCCCAGTTCTACACC | | DVFCCNESEAE | |
| | | CTCTCAGATGTGTTCTGCTG | | ILTGLTVGSAA | |
| | | CAATGAAAGTGAGGCTGAG | | DA | |
| | | ATTTTAACTGGCCTCACGGT | | | |
| | | GGGCAGCGCTGCAGATGCT | | | |
| SS-022 | Secretion | ATGAAGCCTCTCCTTGTTGT | 56 | MKPLLVVFVFL | 118 |
| | signal | GTTTGTCTTTCTTTTCCTTTG | | FLWDPVLA | |
| | | GGATCCAGTGCTGGCA | | | |
| SS-023 | Secretion | ATGTCCTGTTCCCTAAAGTT | 57 | MSCSLKFTLIVI | 119 |
| | signal | TACTTTGATTGTAATTTTTTT | | FFTCTLSSS | |
| | | TTACTGTTGGCTTTCATCCA | | | |
| | | GC | | | |
| SS-024 | Secretion | ATGGTTCTTACTAAACCTCT | 58 | MVLTKPLQRN | 120 |
| | signal | TCAAAGAAATGGCAGCATG | | GSMMSFENVK | |
| | | ATGAGCTTTGAAAATGTGAA | | EKSREGGPHAH | |
| | | AGAAAAGAGCAGAGAAGGA | | TPEEELCFVVT | |
| | | GGGCCCCATGCACACACAC | | HTPQVQTTLNL | |
| | | CCGAAGAAGAATTGTGTTTC | | FFHIFKVLTQPL | |
| | | GTGGTAACACACTACCCTCA | | SLLWG | |
| | | GGTTCAGACCACACTCAACC | | | |
| | | TGTTTTTCCATATATTCAAG | | | |
| | | GTTCTTACTCAACCACTTTC | | | |
| | | CCTTCTGTGGGGT | | | |
| SS-025 | Secretion | ATGGCCACCCCGCCATTCCG | 59 | MATPPFRLIRK | 121 |
| | signal | GCTGATAAGGAAGATGTTTT | | MFSFKVSRWM | |
| | | CCTTCAAGGTGAGCAGATG | | GLACFRSLAAS | |
| | | GATGGGGCTTGCCTGCTTCC | | | |
| | | GGTCCCTGGCGGCATCC | | | |
| SS-026 | Secretion | ATGAGCTTTTTCCAACTCCT | 60 | MSFFQLLMKR | 122 |
| | signal | GATGAAAAGGAAGGAACTC | | KELIPLVVFMT | |
| | | ATTCCCTTGGTGGTGTTCAT | | VAAGGASS | |
| | | GACTGTGGCGGCGGGTGGA | | | |
| | | GCCTCATCT | | | |
| SS-027 | Secretion | ATGGTCTCAGCTCTGCGGGG | 61 | MVSALRGAPLI | 123 |
| | signal | AGCACCCCTGATCAGGGTGC | | RVHSSPVSSPSV | |
| | | ACTCAAGCCCTGTTTCTTCT | | SGPAALVSCLS | |
| | | CCTTCTGTGAGTGGACCACG | | SQSSALS | |
| | | GAGGCTGGTGAGCTGCCTGT | | | |
| | | CATCCCAAAGCTCAGCTCTG | | | |
| | | AGC | | | |
| SS-028 | Secretion | ATGATGGGGTCCCCAGTGA | 62 | MMGSPVSHLL | 124 |
| | signal | GTCATCTGCTGGCCGGCTTC | | AGFCVWVVLG | |
| | | TGTGTGTGGGTCGTCTTGGG | | | |
| | | C | | | |
| SS-029 | Secretion | ATGGCAAGCATGGCTGCCGT | 63 | MASMAAVLTW | 125 |
| | signal | GCTCACCTGGGCTCTGGCTC | | ALALLSAFSAT | |
| | | TTCTTTCAGCGTTTTCGGCC | | QA | |
| | | ACCCAGGCA | | | |
| SS-030 | Secretion | ATGGTGCTCATGTGGACCAG | 64 | MVLMWTSGDA | 126 |
| | signal | TGGTGACGCCTTCAAGACGG | | FKTAYFLLKGA | |
| | | CCTACTTCCTGCTGAAGGGT | | PLQFSVCGLLQ | |
| | | GCCCCTCTGCAGTTCTCCGT | | VLVDLAILGQA | |
| | | GTGCGGCCTGCTGCAGGTGC | | TA | |
| | | TGGTGGACCTGGCCATCCTG | | | |
| | | GGGCAGGCCTACGCC | | | |
| SS-031 | Secretion | ATGGATTTTGTCGCTGGAGC | 65 | MDFVAGAIGG | 127 |
| | signal | CATCGGAGGCGTCTGCGGTG | | VCGVAVGYPL | |
| | | TTGCTGTGGGCTACCCCCTG | | DTVKVRIQTEP | |
| | | GACACGGTGAAGGTCAGGA | | LYTGIWHCVRD | |
| | | TCCAGACGGAGCCAAAGTA | | TYHRERVWGF | |
| | | CACAGGCATCTGGCACTGCG | | YRGLSLPVCTV | |
| | | TCCGGGATACGTATCACCGA | | SLVSS | |
| | | GAGCGCGTGTGGG | | | |
| | | GCTTCTACCGGGGCCTCTCG | | | |
| | | CTGCCCGTGTGCACGGTGTC | | | |
| | | CCTGGTATCTTCC | | | |
| SS-032 | Secretion | ATGGAGAAGCCCCTCTTCCC | 66 | MEKPLFPLVPL | 128 |
| | signal | ATTAGTGCCTTTGCATTGGT | | HWFGFGYTAL | |
| | | TTGGCTTTGGCTACACAGCA | | VVSGGIVGYVK | |
| | | CTGGTTGTTTCTGGTGGGAT | | TGSVPSLAAGL | |
| | | CGTTGGCTATGTAAAAACAG | | LFGSLA | |
| | | GCAGCGTGCCGTCCCTGGCT | | | |
| | | GCAGGGCTGCTCTTCGGCAG | | | |
| | | TCTAGCC | | | |
| SS-033 | Secretion | ATGGGTCTGCTCCTTCCCCT | 67 | MGLLLPLALCI | 129 |
| | signal | GGCACTCTGCATCCTAGTCC | | LVLC | |
| | | TGTGC | | | |
| SS-034 | Secretion | ATGGGGATCCAGACGAGCC | 68 | MGIQTSPVLLA | 130 |
| | signal | CCGTCCTGCTGGCCTCCCTG | | SLGVGLVTLLG | |
| | | GGGGTGGGGCTGGTCACTCT | | LAVG | |
| | | GCTCGGCCTGGCTGTGGGC | | | |
| SS-035 | Secretion | ATGTCGGACCTGCTACTACT | 69 | MSDLLLLGLIG | 131 |
| | signal | GGGCCTGATTGGGGGCCTG | | GLTLLLLLTLL | |
| | | ACTCTCTTACTGCTGCTGAC | | AFA | |
| | | GCTGCTAGCCTTTGCC | | | |
| SS-036 | Secretion | ATGGAGACTGTGGTGATTGT | 70 | METVVIVAIGV | 132 |
| | signal | TGCCATAGGTGTGCTGGCCA | | LATIFLASFAAL | |
| | | CCATGTTTCTGGCTTCGTTT | | VLVCRQ | |
| | | GCAGCCTTGGTGCTGGTTTG | | | |
| | | CAGGCAG | | | |
| SS-037 | Secretion | ATGCGCGGCTCTGTGGAGTG | 71 | MAGSVECTWG | 133 |
| | signal | CACCTGGGGTTGGGGGCACT | | WGHCAPSPLLL | |
| | | GTGCCCCCAGCCCCCTGCTC | | WTLLLFAAPFG | |
| | | CTTTGGACTCTACTTCTGTTT | | LLG | |
| | | GCAGCCCCATTTGGCCTGCT | | | |
| | | GGGG | | | |
| SS-038 | Secretion | ATGATGCCGTCCCGTACCAA | 72 | MMPSRTNLAT | 134 |
| | signal | CCTGGCTACTGGAATCCCCA | | GIPSSKVKYSRL | |
| | | GTAGTAAAGTGAAATATTCA | | SSTDDGYIDLQ | |
| | | AGGCTCTCCAGCACAGACG | | FKKTPPKIPYK | |
| | | ATGGCTACATTGACCTTCAG | | AIALATVLFLIG | |
| | | TTTAAGAAAACCCCTCCTAA | | A | |
| | | GATCCCTTATAAGGCCATCG | | | |
| | | CACTTGCCACTGTGCTGTTT | | | |
| | | TTGATTGGCGCC | | | |
| SS-039 | Secretion | ATGGCCCTGCCCCAGATGTG | 73 | MALPQMCDGS | 135 |
| | signal | TGACGGGAGCCACTTGGCCT | | HLASTLRYCMT | |
| | | CCACCCTCCGCTATTGCATG | | VSGTVVLVAGT | |
| | | ACAGTCAGCGGCACAGTGG | | LCFA | |
| | | TTCTGGTGGCCGGGACGCTC | | | |
| | | TGCTTCGCT | | | |
| SS-041 | Vrg-6 | TGAAAAAGTGGTTCGTTGCT | 74 | MKKWFVAAGI | 136 |
| | | GCCGGCATCGGCGCTGCCG | | GAGLLMLSSAA | |
| | | GACTCATGCTCTCCAGCGCC | | | |
| | | GCCA | | | |
| SS-042 | PhoA | ATGAAACAGAGCACCATTG | 75 | MKQSTIALALL | 137 |
| | | CGCTGGCGCTGCTGCCGCTG | | PLLFTPVTKA | |
| | | CTGTTTACCCCGGTGACCAA | | | |
| | | AGCG | | | |
| SS-043 | OmpA | ATGAAAAAAACCGCGATTG | 76 | MKKTAIAIAVA | 138 |
| | | CGATTGCGGTGGCGCTGGCG | | LAGFATVAQA | |
| | | GGCTTTGCGACCGTGGCGCA | | | |
| | | GGCG | | | |
| SS-044 | STI | ATGAAAAAACTGATGCTGG | 77 | MKKLMLAIFFS | 139 |
| | | CGATTTTTTTTAGCGTGCTG | | VLSFPSFSQS | |
| | | AGCTTTCCGAGCTTTAGCCA | | | |
| | | GAGC | | | |
| SS-045 | STII | ATGAAAAAAAACATTGCGT | 78 | MKKNIAFLLAS | 140 |
| | | TTCTGCTGGCGAGCATGTTT | | MFVFSIATNAY | |
| | | GTGTTTAGCATTGCGACCAA | | A | |
| | | CGCGTATGCG | | | |
| SS-046 | Amylase | ATGTTTGCGAAACGCTTTAA | 79 | MFAKRFKTSLL | 141 |
| | | AACCAGCCTGCTGCCGCTGT | | PLFAGFLLLFHL | |
| | | TTGCGGGCTTTCTGCTGCTG | | VLAGPAAAS | |
| | | TTTCATCTGGTGCTGGCGGG | | | |
| | | CCCGGCGGCGGCGAGC | | | |
| SS-047 | Alpha Factor | ATGCGCTTTCCGAGCATTTT | 80 | MRFPSIFTAVLF | 142 |
| | | TACCGCGGTGCTGTTTGCGG | | AASSALA | |
| | | CGAGCAGCGCGCTGGCG | | | |
| SS-048 | Alpha Factor | ATGCGCTTTCCGAGCATTTT | 81 | MRFPSIFTTVLF | 143 |
| | | TACCACCGTGCTGTTTGCGG | | AASSALA | |
| | | CGAGCAGCGCGCTGGCG | | | |
| SS-049 | Alpha Factor | ATGCGCTTTCCGAGCATTTT | 82 | MRFPSIFTSVLF | 144 |
| | | TACCAGCGTGCTGTTTGCGG | | AASSALA | |
| | | CGAGCAGCGCGCTGGCG | | | |
| SS-050 | Alpha Factor | ATGCGCTTTCCGAGCATTTT | 83 | MRFPSIFTHVLF | 145 |
| | | TACCCATGTGCTGTTTGCGG | | AASSALA | |
| | | CGAGCAGCGCGCTGGCG | | | |
| SS-051 | Alpha Factor | ATGCGCTTTCCGAGCATTTT | 84 | MRFPSIFTIVLF | 146 |
| | | TACCATTGTGCTGTTTGCGG | | AASSALA | |
| | | CGAGCAGCGCGCTGGCG | | | |
| SS-052 | Alpha Factor | ATGCGCTTTCCGAGCATTTT | 85 | MRFPSIFTFVLF | 147 |
| | | TACCTTTGTGCTGTTTGCGG | | AASSALA | |
| | | CGAGCAGCGCGCTGGCG | | | |
| SS-053 | Alpha Factor | ATGCGCTTTCCGAGCATTTT | 86 | MRFPSIFTEVLF | 148 |
| | | TACCGAAGTGCTGTTTGCGG | | AASSALA | |
| | | CGAGCAGCGCGCTGGCG | | | |
| SS-054 | Alpha Factor | ATGCGCTTTCCGAGCATTTT | 87 | MRFPSIFTGVLF | 149 |
| | | TACCGGCGTGCTGTTTGCGG | | AASSALA | |
| | | CGAGCAGCGCGCTGGCG | | | |
| SS-055 | Endoglucanase | ATGCGTTCCTCCCCCCTCCT | 88 | MRSSPLLRSAV | 150 |
| | V | CCGCTCCGCCGTTGTGGCCG | | VAALPVLALA | |
| | | CCCTGCCGGTGTTGGCCCTT | | | |
| | | GCC | | | |
| SS-056 | Secretion | ATGGGCGCGGCGGCCGTGC | 89 | MGAAAVRWHL | 151 |
| | signal | GCTGGCACTTGTGCGTGCTG | | CVLLALGTRGR | |
| | | CTGGCCCTGGGCACACGCG | | L | |
| | | GGCGGCTG | | | |
| SS-057 | Fungal | ATGAGGAGCTCCCTTGTGCT | 90 | MRSSLVLFFVS | 152 |
| | | GTTCTTTGTCTCTGCGTGGA | | AWTALA | |
| | | CGGCCTTGGCCAG | | | |
| SS-058 | Fibronectin | ATGCTCAGGGGTCCGGGAC | 91 | MLRGPGPGRLL | 153 |
| | | CCGGGCGGCTGCTGCTGCTA | | LLAVLCLGTSV | |
| | | GCAGTCCTGTGCCTGGGGAC | | RCTETGKSKR | |
| | | ATCGGTGCGCTGCACCGAA | | | |
| | | ACCGGGAAGAGCAAGAGG | | | |
| SS-059 | Fibronectin | ATGCTTAGGGGTCCGGGGCC | 92 | MLRGPGPGLLL | 154 |
| | | CGGGCTGCTGCTGCTGGCCG | | LAVQCLGTAVP | |
| | | TCCAGCTGGGGACAGCGGT | | STGA | |
| | | GCCCTCCACG | | | |
| SS-060 | Fibronectin | ATGCGCCGGGGGGCCCTGA | 93 | MRRGALTGLLL | 155 |
| | | CCGGGCTGCTCCTGGTCCTG | | VLCLSVVLRAA | |
| | | TGCCTGAGTGTTGTGCTACG | | PSATSKKRR | |
| | | TGCAGCCCCCTCTGCAACAA | | | |
| | | GCAAGAAGCGCAGG | | | |

[0215] In Table 5, SS is secretion signal and MLS is mitochondrial leader signal. The primary constructs or mmRNA of the present invention may be designed to encode any of the signal peptide sequences of SEQ ID NOs 94-155, or fragments or variants thereof. These sequences may be included at the beginning of the polypeptide coding region, in the middle or at the terminus or alternatively into a flanking region. Further, any of the polynucleotide primary constructs of the present invention may also comprise one or more of the sequences defined by SEQ ID NOs 32-93. These may be in the first region or either flanking region.

[0216] Additional signal peptide sequences which may be utilized in the present invention include those taught in, for example, databases such as those found at http://www.signalpeptide.de/ or http://proline.bic.nus.edu.sg/spdb/. Those described in U.S. Pat. Nos. 8,124,379; 7,413,875 and 7,385,034 are also within the scope of the invention and the contents of each are incorporated herein by reference in their entirety.

### Target Selection

[0217] According to the present invention, the primary constructs comprise at least a first region of linked nucleosides encoding at least one polypeptide of interest. The polypeptides of interest or “targets” or proteins and peptides of the present invention are listed in U.S. Provisional Patent Application No. 61/618,862, filed Apr. 2, 2012, entitled Modified Polynucleotides for the Production of Biologics; U.S. Provisional Patent Application No. 61/681,645, filed Aug. 10, 2012, entitled Modified Polynucleotides for the Production of Biologics; U.S. Provisional Patent Application No. 61/737,130, filed Dec. 14, 2012, entitled Modified Polynucleotides for the Production of Biologics; U.S. Provisional Patent Application No. 61/618,866, filed Apr. 2, 2012, entitled Modified Polynucleotides for the Production of Antibodies; U.S. Provisional Patent Application No. 61/681,647, filed Aug. 10, 2012, entitled Modified Polynucleotides for the Production of Antibodies; U.S. Provisional Patent Application No. 61/737,134, filed Dec. 14, 2012, entitled Modified Polynucleotides for the Production of Antibodies; U.S. Provisional Patent Application No. 61/618,868, filed Apr. 2, 2012, entitled Modified Polynucleotides for the Production of Vaccines; U.S. Provisional Patent Application No. 61/681,648, filed Aug. 10, 2012, entitled Modified Polynucleotides for the Production of Vaccines; U.S. Provisional Patent Application No. 61/737,135, filed Dec. 14, 2012, entitled Modified Polynucleotides for the Production of Vaccines; U.S. Provisional Patent Application No. 61/618,870, filed Apr. 2, 2012, entitled Modified Polynucleotides for the Production of Therapeutic Proteins and Peptides; U.S. Provisional Patent Application No. 61/681,649, filed Aug. 10, 2012, entitled Modified Polynucleotides for the Production of Therapeutic Proteins and Peptides; U.S. Provisional Patent Application No. 61/737,139, filed Dec. 14, 2012, Modified Polynucleotides for the Production of Therapeutic Proteins and Peptides; U.S. Provisional Patent Application No. 61/618,873, filed Apr. 2, 2012, entitled Modified Polynucleotides for the Production of Secreted Proteins; U.S. Provisional Patent Application No. 61/681,650, filed Aug. 10, 2012, entitled Modified Polynucleotides for the Production of Secreted Proteins; U.S. Provisional Patent Application No. 61/737,147, filed Dec. 14, 2012, entitled Modified Polynucleotides for the Production of Secreted Proteins; U.S. Provisional Patent Application No. 61/618,878, filed Apr. 2, 2012, entitled Modified Polynucleotides for the Production of Plasma Membrane Proteins; U.S. Provisional Patent Application No. 61/681,654, filed Aug. 10, 2012, entitled Modified Polynucleotides for the Production of Plasma Membrane Proteins; U.S. Provisional Patent Application No. 61/737,152, filed Dec. 14, 2012, entitled Modified Polynucleotides for the Production of Plasma Membrane Proteins; U.S. Provisional Patent Application No. 61/618,885, filed Apr. 2, 2012, entitled Modified Polynucleotides for the Production of Cytoplasmic and Cytoskeletal Proteins; U.S. Provisional Patent Application No. 61/681,658, filed Aug. 10, 2012, entitled Modified Polynucleotides for the Production of Cytoplasmic and Cytoskeletal Proteins; U.S. Provisional Patent Application No. 61/737,155, filed Dec. 14, 2012, entitled Modified Polynucleotides for the Production of Cytoplasmic and Cytoskeletal Proteins; U.S. Provisional Patent Application No. 61/618,896, filed Apr. 2, 2012, entitled Modified Polynucleotides for the Production of Intracellular Membrane Bound Proteins; U.S. Provisional Patent Application No. 61/668,157, filed Jul. 5, 2012, entitled Modified Polynucleotides for the Production of Intracellular Membrane Bound Proteins; U.S. Provisional Patent Application No. 61/681,661, filed Aug. 10, 2012, entitled Modified Polynucleotides for the Production of Intracellular Membrane Bound Proteins; U.S. Provisional Patent Application No. 61/737,160, filed Dec. 14, 2012, entitled Modified Polynucleotides for the Production of Intracellular Membrane Bound Proteins; U.S. Provisional Patent Application No. 61/618,911, filed Apr. 2, 2012, entitled Modified Polynucleotides for the Production of Nuclear Proteins; U.S. Provisional Patent Application No. 61/681,667, filed Aug. 10, 2012, entitled Modified Polynucleotides for the Production of Nuclear Proteins; U.S. Provisional Patent Application No. 61/737,168, filed Dec. 14, 2012, entitled Modified Polynucleotides for the Production of Nuclear Proteins; U.S. Provisional Patent Application No. 61/618,922, filed Apr. 2, 2012, entitled Modified Polynucleotides for the Production of Proteins; U.S. Provisional Patent Application No. 61/681,675, filed Aug. 10, 2012, entitled Modified Polynucleotides for the Production of Proteins; U.S. Provisional Patent Application No. 61/737,174, filed Dec. 14, 2012, entitled Modified Polynucleotides for the Production of Proteins; U.S. Provisional Patent Application No. 61/618,935, filed Apr. 2, 2012, entitled Modified Polynucleotides for the Production of Proteins Associated with Human Disease; U.S. Provisional Patent Application No. 61/681,687, filed Aug. 10, 2012, entitled Modified Polynucleotides for the Production of Proteins Associated with Human Disease; U.S. Provisional Patent Application No. 61/737,184, filed Dec. 14, 2012, entitled Modified Polynucleotides for the Production of Proteins Associated with Human Disease; U.S. Provisional Patent Application No. 61/618,945, filed Apr. 2, 2012, entitled Modified Polynucleotides for the Production of Proteins Associated with Human Disease; U.S. Provisional Patent Application No. 61/681,696, filed Aug. 10, 2012, entitled Modified Polynucleotides for the Production of Proteins Associated with Human Disease; U.S. Provisional Patent Application No. 61/737,191, filed Dec. 14, 2012, entitled Modified Polynucleotides for the Production of Proteins Associated with Human Disease; U.S. Provisional Patent Application No. 61/618,953, filed Apr. 2, 2012, entitled Modified Polynucleotides for the Production of Proteins Associated with Human Disease; U.S. Provisional Patent Application No. 61/681,704, filed Aug. 10, 2012, entitled Modified Polynucleotides for the Production of Proteins Associated with Human Disease; U.S. Provisional Patent Application No. 61/737,203, filed Dec. 14, 2012, entitled Modified Polynucleotides for the Production of Proteins Associated with Human Disease; U.S. Provisional Patent Application No. 61/681,720, filed Aug. 10, 2012, entitled Modified Polynucleotides for the Production of Cosmetic Proteins and Peptides; U.S. Provisional Patent Application No. 61/737,213, filed Dec. 14, 2012, entitled Modified Polynucleotides for the Production of Cosmetic Proteins and Peptides; U.S. Provisional Patent Application No. 61/681,742, filed Aug. 10, 2012, entitled Modified Polynucleotides for the Production of Oncology-Related Proteins and Peptides; International Application No PCT/US2013/030062, filed Mar. 9, 2013, entitled Modified Polynucleotides for the Production of Biologics and Proteins Associated with Human Disease; U.S. patent application Ser. No. 13/791,922, filed Mar. 9, 2013, entitled Modified Polynucleotides for the Production of Biologics and Proteins Associated with Human Disease; International Application No PCT/US2013/030063, filed Mar. 9, 2013, entitled Modified Polynucleotides; International Application No. PCT/US2013/030064, entitled Modified Polynucleotides for the Production of Secreted Proteins; U.S. patent application Ser. No. 13/791,921, filed Mar. 9, 2013, entitled Modified Polynucleotides for the Production of Secreted Proteins; International Application No PCT/US2013/030059, filed Mar. 9, 2013, entitled Modified Polynucleotides for the Production of Membrane Proteins; International Application No. PCT/US2013/030066, filed Mar. 9, 2013, entitled Modified Polynucleotides for the Production of Cytoplasmic and Cytoskeletal Proteins; International Application No. PCT/US2013/030067, filed Mar. 9, 2013, entitled Modified Polynucleotides for the Production of Nuclear Proteins; International Application No. PCT/US2013/030060, filed Mar. 9, 2013, entitled Modified Polynucleotides for the Production of Proteins; International Application No. PCT/US2013/030061, filed Mar. 9, 2013, entitled Modified Polynucleotides for the Production of Proteins Associated with Human Disease; U.S. patent application Ser. No. 13/791,910, filed Mar. 9, 2013, entitled Modified Polynucleotides for the Production of Proteins Associated with Human Disease; International Application No. PCT/US2013/030068, filed Mar. 9, 2013, entitled Modified Polynucleotides for the Production of Cosmetic Proteins and Peptides; and International Application No. PCT/US2013/030070, filed Mar. 9, 2013, entitled Modified Polynucleotides for the Production of Oncology-Related Proteins and Peptides; International Patent Application No. PCT/US2013/031821, filed Mar. 15, 2013, entitled In Vivo Production of Proteins, the contents of each of which are herein incorporated by reference in their entireties.

### Protein Cleavage Signals and Sites

[0218] In one embodiment, the polypeptides of the present invention may include at least one protein cleavage signal containing at least one protein cleavage site. The protein cleavage site may be located at the N-terminus, the C-terminus, at any space between the N- and the C-termini such as, but not limited to, half-way between the N- and C-termini, between the N-terminus and the half way point, between the half way point and the C-terminus, and combinations thereof.

[0219] The polypeptides of the present invention may include, but is not limited to, a proprotein convertase (or prohormone convertase), thrombin or Factor Xa protein cleavage signal. Proprotein convertases are a family of nine proteinases, comprising seven basic amino acid-specific subtilisin-like serine proteinases related to yeast kexin, known as prohormone convertase 1/3 (PC1/3), PC2, furin, PC4, PC5/6, paired basic amino-acid cleaving enzyme 4 (PACE4) and PC7, and two other subtilases that cleave at non-basic residues, called subtilisin kexin isozyme 1 (SKI-1) and proprotein convertase subtilisin kexin 9 (PCSK9). Non-limiting examples of protein cleavage signal amino acid sequences are listing in Table 6. In Table 6, “X” refers to any amino acid, “n” may be 0, 2, 4 or 6 amino acids and “*” refers to the protein cleavage site. In Table 6, SEQ ID NO: 158 refers to when n=4 and SEQ ID NO:159 refers to when n=6.

TABLE 6
Protein Cleavage Site Sequences

| Protein Cleavage | Amino Acid Cleavage | |
|---|---|---|
| Signal | Sequence | SEQ ID NO |
| Proprotein convertase | R-X-X-R* | 156 |
| | R-X-K/R-R* | 157 |
| | K/R-Xn-K/R* | 158 or 159 |
| Thrombin | L-V-P-R*-G-S | 160 |
| | L-V-P-R* | 161 |
| | A/F/G/I/L/T/V/M- | 162 |
| | A/F/G/I/L/T/V/W/A-P-R* | |
| Factor Xa | I-E-G-R* | 163 |
| | I-D-G-R* | 164 |
| | A-E-G-R* | 165 |
| | A/F/G/I/L/T/V/M-D/E-G-R* | 166 |

[0220] In one embodiment, the primary constructs, modified nucleic acids and the mmRNA of the present invention may be engineered such that the primary construct, modified nucleic acid or mmRNA contains at least one encoded protein cleavage signal. The encoded protein cleavage signal may be located before the start codon, after the start codon, before the coding region, within the coding region such as, but not limited to, half way in the coding region, between the start codon and the half way point, between the half way point and the stop codon, after the coding region, before the stop codon, between two stop codons, after the stop codon and combinations thereof.

[0221] In one embodiment, the primary constructs, modified nucleic acids or mmRNA of the present invention may include at least one encoded protein cleavage signal containing at least one protein cleavage site. The encoded protein cleavage signal may include, but is not limited to, a proprotein convertase (or prohormone convertase), thrombin and/or Factor Xa protein cleavage signal. One of skill in the art may use Table 1 above or other known methods to determine the appropriate encoded protein cleavage signal to include in the primary constructs, modified nucleic acids or mmRNA of the present invention. For example, starting with the signal of Table 6 and considering the codons of Table 1 one can design a signal for the primary construct which can produce a protein signal in the resulting polypeptide.

[0222] In one embodiment, the polypeptides of the present invention include at least one protein cleavage signal and/or site.

[0223] As a non-limiting example, U.S. Pat. No. 7,374,930 and U.S. Pub. No. 20090227660, herein incorporated by reference in their entireties, use a furin cleavage site to cleave the N-terminal methionine of GLP-1 in the expression product from the Golgi apparatus of the cells. In one embodiment, the polypeptides of the present invention include at least one protein cleavage signal and/or site with the proviso that the polypeptide is not GLP-1.

[0224] In one embodiment, the primary constructs, modified nucleic acids or mmRNA of the present invention includes at least one encoded protein cleavage signal and/or site.

[0225] In one embodiment, the primary constructs, modified nucleic acid or mmRNA of the present invention includes at least one encoded protein cleavage signal and/or site with the proviso that the primary construct, modified nucleic acid or mmRNA does not encode GLP-1.

[0226] In one embodiment, the primary constructs, modified nucleic acid or mmRNA of the present invention may include more than one coding region. Where multiple coding regions are present in the primary construct, modified nucleic acid or mmRNA of the present invention, the multiple coding regions may be separated by encoded protein cleavage sites. As a non-limiting example, the primary construct, modified nucleic acid or mmRNA may be signed in an ordered pattern. On such pattern follows AXBY form where A and B are coding regions which may be the same or different coding regions and/or may encode the same or different polypeptides, and X and Y are encoded protein cleavage signals which may encode the same or different protein cleavage signals. A second such pattern follows the form AXYBZ where A and B are coding regions which may be the same or different coding regions and/or may encode the same or different polypeptides, and X, Y and Z are encoded protein cleavage signals which may encode the same or different protein cleavage signals. A third pattern follows the form ABXCY where A, B and C are coding regions which may be the same or different coding regions and/or may encode the same or different polypeptides, and X and Y are encoded protein cleavage signals which may encode the same or different protein cleavage signals.

[0227] In on embodiment, the polypeptides, primary constructs, modified nucleic acids and mmRNA can also contain sequences that encode protein cleavage sites so that the polypeptides, primary constructs, modified nucleic acids and mmRNA can be released from a carrier region or a fusion partner by treatment with a specific protease for said protein cleavage site.

[0228] Table 7 is a non-exhaustive listing of miRs and miR binding sites (miR BS) and their sequences which may be used with the present invention.

TABLE 7
Mirs and mir binding sites

| | | MIR | | | MIR |
|---|---|---|---|---|---|
| | mir | BS | | mir | BS |
| | SEQ | SEQ | | SEQ | SEQ |
| microRNA | ID | FID | microRNA | ID | ID |
| hsa-let-7a-2-3p | 167 | 1188 | hsa-miR-4471 | 2209 | 3230 |
| hsa-let-7a-3p | 168 | 1189 | hsa-miR-4472 | 2210 | 3231 |
| hsa-let-7a-5p | 169 | 1190 | hsa-miR-4473 | 2211 | 3232 |
| hsa-let-7b-3p | 170 | 1191 | hsa-miR-4474-3p | 2212 | 3233 |
| hsa-let-7b-5p | 171 | 1192 | hsa-miR-4474-5p | 2213 | 3234 |
| hsa-let-7c | 172 | 1193 | hsa-miR-4475 | 2214 | 3235 |
| hsa-let-7d-3p | 173 | 1194 | hsa-miR-4476 | 2215 | 3236 |
| hsa-let-7d-5p | 174 | 1195 | hsa-miR-4477a | 2216 | 3237 |
| hsa-let-7e-3p | 175 | 1196 | hsa-miR-4477b | 2217 | 3238 |
| hsa-let-7e-5p | 176 | 1197 | hsa-miR-4478 | 2218 | 3239 |
| hsa-let-7f-1-3p | 177 | 1198 | hsa-miR-4479 | 2219 | 3240 |
| hsa-let-7f-2-3p | 178 | 1199 | hsa-miR-448 | 2220 | 3241 |
| hsa-let-7f-5p | 179 | 1200 | hsa-miR-4480 | 2221 | 3242 |
| hsa-let-7g-3p | 180 | 1201 | hsa-miR-4481 | 2222 | 3243 |
| hsa-let-7g-5p | 181 | 1202 | hsa-miR-4482-3p | 2223 | 3244 |
| hsa-let-7i-3p | 182 | 1203 | hsa-miR-4482-5p | 2224 | 3245 |
| hsa-let-7i-5p | 183 | 1204 | hsa-miR-4483 | 2225 | 3246 |
| hsa-miR-1 | 184 | 1205 | hsa-miR-4484 | 2226 | 3247 |
| hsa-miR-100-3p | 185 | 1206 | hsa-miR-4485 | 2227 | 3248 |
| hsa-miR-100-5p | 186 | 1207 | hsa-miR-4486 | 2228 | 3249 |
| hsa-miR-101-3p | 187 | 1208 | hsa-miR-4487 | 2229 | 3250 |
| hsa-miR-101-5p | 188 | 1209 | hsa-miR-4488 | 2230 | 3251 |
| hsa-miR-103a-2-5p | 189 | 1210 | hsa-miR-4489 | 2231 | 3252 |
| hsa-miR-103a-3p | 190 | 1211 | hsa-miR-4490 | 2232 | 3253 |
| hsa-miR-103b | 191 | 1212 | hsa-miR-4491 | 2233 | 3254 |
| hsa-miR-105-3p | 192 | 1213 | hsa-miR-4492 | 2234 | 3255 |
| hsa-miR-105-5p | 193 | 1214 | hsa-miR-4493 | 2235 | 3256 |
| hsa-miR-106a-3p | 194 | 1215 | hsa-miR-4494 | 2236 | 3257 |
| hsa-miR-106a-5p | 195 | 1216 | hsa-miR-4495 | 2237 | 3258 |
| hsa-miR-106b-3p | 196 | 1217 | hsa-miR-4496 | 2238 | 3259 |
| hsa-miR-106b-5p | 197 | 1218 | hsa-miR-4497 | 2239 | 3260 |
| hsa-miR-107 | 198 | 1219 | hsa-miR-4498 | 2240 | 3261 |
| hsa-miR-10a-3p | 199 | 1220 | hsa-miR-4499 | 2241 | 3262 |
| hsa-miR-10a-5p | 200 | 1221 | hsa-miR-449a | 2242 | 3263 |
| hsa-miR-10b-3p | 201 | 1222 | hsa-miR-449b-3p | 2243 | 3264 |
| hsa-miR-10b-5p | 202 | 1223 | hsa-miR-449b-5p | 2244 | 3265 |
| hsa-miR-1178-3p | 203 | 1224 | hsa-miR-449c-3p | 2245 | 3266 |
| hsa-miR-1178-5p | 204 | 1225 | hsa-miR-449c-5p | 2246 | 3267 |
| hsa-miR-1179 | 205 | 1226 | hsa-miR-4500 | 2247 | 3268 |
| hsa-miR-1180 | 206 | 1227 | hsa-miR-4501 | 2248 | 3269 |
| hsa-miR-1181 | 207 | 1228 | hsa-miR-4502 | 2249 | 3270 |
| hsa-miR-1182 | 208 | 1229 | hsa-miR-4503 | 2250 | 3271 |
| hsa-miR-1183 | 209 | 1230 | hsa-miR-4504 | 2251 | 3272 |
| hsa-miR-1184 | 210 | 1231 | hsa-miR-4505 | 2252 | 3273 |
| hsa-miR-1185-1-3p | 211 | 1232 | hsa-miR-4506 | 2253 | 3274 |
| hsa-miR-1185-2-3p | 212 | 1233 | hsa-miR-4507 | 2254 | 3275 |
| hsa-miR-1185-5p | 213 | 1234 | hsa-miR-4508 | 2255 | 3276 |
| hsa-miR-1193 | 214 | 1235 | hsa-miR-4509 | 2256 | 3277 |
| hsa-miR-1197 | 215 | 1236 | hsa-miR-450a-3p | 2257 | 3278 |
| hsa-miR-1200 | 216 | 1237 | hsa-miR-450a-5p | 2258 | 3279 |
| hsa-miR-1202 | 217 | 1238 | hsa-miR-450b-3p | 2259 | 3280 |
| hsa-miR-1203 | 218 | 1239 | hsa-miR-450b-5p | 2260 | 3281 |
| hsa-miR-1204 | 219 | 1240 | hsa-miR-4510 | 2261 | 3282 |
| hsa-miR-1205 | 220 | 1241 | hsa-miR-4511 | 2262 | 3283 |
| hsa-miR-1206 | 221 | 1242 | hsa-miR-4512 | 2263 | 3284 |
| hsa-miR-1207-3p | 222 | 1243 | hsa-miR-4513 | 2264 | 3285 |
| hsa-miR-1207-5p | 223 | 1244 | hsa-miR-4514 | 2265 | 3286 |
| hsa-miR-1208 | 224 | 1245 | hsa-miR-4515 | 2266 | 3287 |
| hsa-miR-122-3p | 225 | 1246 | hsa-miR-4516 | 2267 | 3288 |
| hsa-miR-1224-3p | 226 | 1247 | hsa-miR-4517 | 2268 | 3289 |
| hsa-miR-1224-5p | 227 | 1248 | hsa-miR-4518 | 2269 | 3290 |
| hsa-miR-1225-3p | 228 | 1249 | hsa-miR-4519 | 2270 | 3291 |
| hsa-miR-1225-5p | 229 | 1250 | hsa-miR-451a | 2271 | 3292 |
| hsa-miR-122-5p | 230 | 1251 | hsa-miR-451b | 2272 | 3293 |
| hsa-miR-1226-3p | 231 | 1252 | hsa-miR-4520a-3p | 2273 | 3294 |
| hsa-miR-1226-5p | 232 | 1253 | hsa-miR-4520a-5p | 2274 | 3295 |
| hsa-miR-1227-3p | 233 | 1254 | hsa-miR-4520b-3p | 2275 | 3296 |
| hsa-miR-1227-5p | 234 | 1255 | hsa-miR-4520b-5p | 2276 | 3297 |
| hsa-miR-1228-3p | 235 | 1256 | hsa-miR-4521 | 2277 | 3298 |
| hsa-miR-1228-5p | 236 | 1257 | hsa-miR-4522 | 2278 | 3299 |
| hsa-miR-1229-3p | 237 | 1258 | hsa-miR-4523 | 2279 | 3300 |
| hsa-miR-1229-5p | 238 | 1259 | hsa-miR-452-3p | 2280 | 3301 |
| hsa-miR-1231 | 239 | 1260 | hsa-miR-4524a-3p | 2281 | 3302 |
| hsa-miR-1233-1-5p | 240 | 1261 | hsa-miR-4524a-5p | 2282 | 3303 |
| hsa-miR-1233-3p | 241 | 1262 | hsa-miR-4524b-3p | 2283 | 3304 |
| hsa-miR-1234-3p | 242 | 1263 | hsa-miR-4524b-5p | 2284 | 3305 |
| hsa-miR-1234-5p | 243 | 1264 | hsa-miR-4525 | 2285 | 3306 |
| hsa-miR-1236-3p | 244 | 1265 | hsa-miR-452-5p | 2286 | 3307 |
| hsa-miR-1236-5p | 245 | 1266 | hsa-miR-4526 | 2287 | 3308 |
| hsa-miR-1237-3p | 246 | 1267 | hsa-miR-4527 | 2288 | 3309 |
| hsa-miR-1237-5p | 247 | 1268 | hsa-miR-4528 | 2289 | 3310 |
| hsa-miR-1238-3p | 248 | 1269 | hsa-miR-4529-3p | 2290 | 3311 |
| hsa-miR-1238-5p | 249 | 1270 | hsa-miR-4529-5p | 2291 | 3312 |
| hsa-miR-1243 | 250 | 1271 | hsa-miR-4530 | 2292 | 3313 |
| hsa-miR-124-3p | 251 | 1272 | hsa-miR-4531 | 2293 | 3314 |
| hsa-miR-1244 | 252 | 1273 | hsa-miR-4532 | 2294 | 3315 |
| hsa-miR-1245a | 253 | 1274 | hsa-miR-4533 | 2295 | 3316 |
| hsa-miR-1245b-3p | 254 | 1275 | hsa-miR-4534 | 2296 | 3317 |
| hsa-miR-1245b-5p | 255 | 1276 | hsa-miR-4535 | 2297 | 3318 |
| hsa-miR-124-5p | 256 | 1277 | hsa-miR-4536-3p | 2298 | 3319 |
| hsa-miR-1246 | 257 | 1278 | hsa-miR-4536-5p | 2299 | 3320 |
| hsa-miR-1247-3p | 258 | 1279 | hsa-miR-4537 | 2300 | 3321 |
| hsa-miR-1247-5p | 259 | 1280 | hsa-miR-4538 | 2301 | 3322 |
| hsa-miR-1248 | 260 | 1281 | hsa-miR-4539 | 2302 | 3323 |
| hsa-miR-1249 | 261 | 1282 | hsa-miR-4540 | 2303 | 3324 |
| hsa-miR-1250 | 262 | 1283 | hsa-miR-454-3p | 2304 | 3325 |
| hsa-miR-1251 | 263 | 1284 | hsa-miR-454-5p | 2305 | 3326 |
| hsa-miR-1252 | 264 | 1285 | hsa-miR-455-3p | 2306 | 3327 |
| hsa-miR-1253 | 265 | 1286 | hsa-miR-455-5p | 2307 | 3328 |
| hsa-miR-1254 | 266 | 1287 | hsa-miR-4632-3p | 2308 | 3329 |
| hsa-miR-1255a | 267 | 1288 | hsa-miR-4632-5p | 2309 | 3330 |
| hsa-miR-1255b-2-3p | 268 | 1289 | hsa-miR-4633-3p | 2310 | 3331 |
| hsa-miR-1255b-5p | 269 | 1290 | hsa-miR-4633-5p | 2311 | 3332 |
| hsa-miR-1256 | 270 | 1291 | hsa-miR-4634 | 2312 | 3333 |
| hsa-miR-1257 | 271 | 1292 | hsa-miR-4635 | 2313 | 3334 |
| hsa-miR-1258 | 272 | 1293 | hsa-miR-4636 | 2314 | 3335 |
| hsa-miR-125a-3p | 273 | 1294 | hsa-miR-4637 | 2315 | 3336 |
| hsa-miR-125a-5p | 274 | 1295 | hsa-miR-4638-3p | 2316 | 3337 |
| hsa-miR-125b-1-3p | 275 | 1296 | hsa-miR-4638-5p | 2317 | 3338 |
| hsa-miR-125b-2-3p | 276 | 1297 | hsa-miR-4639-3p | 2318 | 3339 |
| hsa-miR-125b-5p | 277 | 1298 | hsa-miR-4639-5p | 2319 | 3340 |
| hsa-miR-1260a | 278 | 1299 | hsa-miR-4640-3p | 2320 | 3341 |
| hsa-miR-1260b | 279 | 1300 | hsa-miR-4640-5p | 2321 | 3342 |
| hsa-miR-1261 | 280 | 1301 | hsa-miR-4641 | 2322 | 3343 |
| hsa-miR-1262 | 281 | 1302 | hsa-miR-4642 | 2323 | 3344 |
| hsa-miR-1263 | 282 | 1303 | hsa-miR-4643 | 2324 | 3345 |
| hsa-miR-126-3p | 283 | 1304 | hsa-miR-4644 | 2325 | 3346 |
| hsa-miR-1264 | 284 | 1305 | hsa-miR-4645-3p | 2326 | 3347 |
| hsa-miR-1265 | 285 | 1306 | hsa-miR-4645-5p | 2327 | 3348 |
| hsa-miR-126-5p | 286 | 1307 | hsa-miR-4646-3p | 2328 | 3349 |
| hsa-miR-1266 | 287 | 1308 | hsa-miR-4646-5p | 2329 | 3350 |
| hsa-miR-1267 | 288 | 1309 | hsa-miR-4647 | 2330 | 3351 |
| hsa-miR-1268a | 289 | 1310 | hsa-miR-4648 | 2331 | 3352 |
| hsa-miR-1268b | 290 | 1311 | hsa-miR-4649-3p | 2332 | 3353 |
| hsa-miR-1269a | 291 | 1312 | hsa-miR-4649-5p | 2333 | 3354 |
| hsa-miR-1269b | 292 | 1313 | hsa-miR-4650-3p | 2334 | 3355 |
| hsa-miR-1270 | 293 | 1314 | hsa-miR-4650-5p | 2335 | 3356 |
| hsa-miR-1271-3p | 294 | 1315 | hsa-miR-4651 | 2336 | 3357 |
| hsa-miR-1271-5p | 295 | 1316 | hsa-miR-4652-3p | 2337 | 3358 |
| hsa-miR-1272 | 296 | 1317 | hsa-miR-4652-5p | 2338 | 3359 |
| hsa-miR-1273a | 297 | 1318 | hsa-miR-4653-3p | 2339 | 3360 |
| hsa-miR-1273c | 298 | 1319 | hsa-miR-4653-5p | 2340 | 3361 |
| hsa-miR-1273d | 299 | 1320 | hsa-miR-4654 | 2341 | 3362 |
| hsa-miR-1273e | 300 | 1321 | hsa-miR-4655-3p | 2342 | 3363 |
| hsa-miR-1273f | 301 | 1322 | hsa-miR-4655-5p | 2343 | 3364 |
| hsa-miR-1273g-3p | 302 | 1323 | hsa-miR-4656 | 2344 | 3365 |
| hsa-miR-1273g-5p | 303 | 1324 | hsa-miR-4657 | 2345 | 3366 |
| hsa-miR-127-3p | 304 | 1325 | hsa-miR-4658 | 2346 | 3367 |
| hsa-miR-1275 | 305 | 1326 | hsa-miR-4659a-3p | 2347 | 3368 |
| hsa-miR-127-5p | 306 | 1327 | hsa-miR-4659a-5p | 2348 | 3369 |
| hsa-miR-1276 | 307 | 1328 | hsa-miR-4659b-3p | 2349 | 3370 |
| hsa-miR-1277-3p | 308 | 1329 | hsa-miR-4659b-5p | 2350 | 3371 |
| hsa-miR-1277-5p | 309 | 1330 | hsa-miR-466 | 2351 | 3372 |
| hsa-miR-1278 | 310 | 1331 | hsa-miR-4660 | 2352 | 3373 |
| hsa-miR-1279 | 311 | 1332 | hsa-miR-4661-3p | 2353 | 3374 |
| hsa-miR-128 | 312 | 1333 | hsa-miR-4661-5p | 2354 | 3375 |
| hsa-miR-1281 | 313 | 1334 | hsa-miR-4662a-3p | 2355 | 3376 |
| hsa-miR-1282 | 314 | 1335 | hsa-miR-4662a-5p | 2356 | 3377 |
| hsa-miR-1283 | 315 | 1336 | hsa-miR-4662b | 2357 | 3378 |
| hsa-miR-1284 | 316 | 1337 | hsa-miR-4663 | 2358 | 3379 |
| hsa-miR-1285-3p | 317 | 1338 | hsa-miR-4664-3p | 2359 | 3380 |
| hsa-miR-1285-5p | 318 | 1339 | hsa-miR-4664-5p | 2360 | 3381 |
| hsa-miR-1286 | 319 | 1340 | hsa-miR-4665-3p | 2361 | 3382 |
| hsa-miR-1287 | 320 | 1341 | hsa-miR-4665-5p | 2362 | 3383 |
| hsa-miR-1288 | 321 | 1342 | hsa-miR-4666a-3p | 2363 | 3384 |
| hsa-miR-1289 | 322 | 1343 | hsa-miR-4666a-5p | 2364 | 3385 |
| hsa-miR-1290 | 323 | 1344 | hsa-miR-4666b | 2365 | 3386 |
| hsa-miR-1291 | 324 | 1345 | hsa-miR-4667-3p | 2366 | 3387 |
| hsa-miR-129-1-3p | 325 | 1346 | hsa-miR-4667-5p | 2367 | 3388 |
| hsa-miR-1292-3p | 326 | 1347 | hsa-miR-4668-3p | 2368 | 3389 |
| hsa-miR-129-2-3p | 327 | 1348 | hsa-miR-4668-5p | 2369 | 3390 |
| hsa-miR-1292-5p | 328 | 1349 | hsa-miR-4669 | 2370 | 3391 |
| hsa-miR-1293 | 329 | 1350 | hsa-miR-4670-3p | 2371 | 3392 |
| hsa-miR-1294 | 330 | 1351 | hsa-miR-4670-5p | 2372 | 3393 |
| hsa-miR-1295a | 331 | 1352 | hsa-miR-4671-3p | 2373 | 3394 |
| hsa-miR-1295b-3p | 332 | 1353 | hsa-miR-4671-5p | 2374 | 3395 |
| hsa-miR-1295b-5p | 333 | 1354 | hsa-miR-4672 | 2375 | 3396 |
| hsa-miR-129-5p | 334 | 1355 | hsa-miR-4673 | 2376 | 3397 |
| hsa-miR-1296 | 335 | 1356 | hsa-miR-4674 | 2377 | 3398 |
| hsa-miR-1297 | 336 | 1357 | hsa-miR-4675 | 2378 | 3399 |
| hsa-miR-1298 | 337 | 1358 | hsa-miR-4676-3p | 2379 | 3400 |
| hsa-miR-1299 | 338 | 1359 | hsa-miR-4676-5p | 2380 | 3401 |
| hsa-miR-1301 | 339 | 1360 | hsa-miR-4677-3p | 2381 | 3402 |
| hsa-miR-1302 | 340 | 1361 | hsa-miR-4677-5p | 2382 | 3403 |
| hsa-miR-1303 | 341 | 1362 | hsa-miR-4678 | 2383 | 3404 |
| hsa-miR-1304-3p | 342 | 1363 | hsa-miR-4679 | 2384 | 3405 |
| hsa-miR-1304-5p | 343 | 1364 | hsa-miR-4680-3p | 2385 | 3406 |
| hsa-miR-1305 | 344 | 1365 | hsa-miR-4680-5p | 2386 | 3407 |
| hsa-miR-1306-3p | 345 | 1366 | hsa-miR-4681 | 2387 | 3408 |
| hsa-miR-1306-5p | 346 | 1367 | hsa-miR-4682 | 2388 | 3409 |
| hsa-miR-1307-3p | 347 | 1368 | hsa-miR-4683 | 2389 | 3410 |
| hsa-miR-1307-5p | 348 | 1369 | hsa-miR-4684-3p | 2390 | 3411 |
| hsa-miR-130a-3p | 349 | 1370 | hsa-miR-4684-5p | 2391 | 3412 |
| hsa-miR-130a-5p | 350 | 1371 | hsa-miR-4685-3p | 2392 | 3413 |
| hsa-miR-130b-3p | 351 | 1372 | hsa-miR-4685-5p | 2393 | 3414 |
| hsa-miR-130b-5p | 352 | 1373 | hsa-miR-4686 | 2394 | 3415 |
| hsa-miR-1321 | 353 | 1374 | hsa-miR-4687-3p | 2395 | 3416 |
| hsa-miR-1322 | 354 | 1375 | hsa-miR-4687-5p | 2396 | 3417 |
| hsa-miR-1323 | 355 | 1376 | hsa-miR-4688 | 2397 | 3418 |
| hsa-miR-132-3p | 356 | 1377 | hsa-miR-4689 | 2398 | 3419 |
| hsa-miR-1324 | 357 | 1378 | hsa-miR-4690-3p | 2399 | 3420 |
| hsa-miR-132-5p | 358 | 1379 | hsa-miR-4690-5p | 2400 | 3421 |
| hsa-miR-133a | 359 | 1380 | hsa-miR-4691-3p | 2401 | 3422 |
| hsa-miR-133b | 360 | 1381 | hsa-miR-4691-5p | 2402 | 3423 |
| hsa-miR-134 | 361 | 1382 | hsa-miR-4692 | 2403 | 3424 |
| hsa-miR-1343 | 362 | 1383 | hsa-miR-4693-3p | 2404 | 3425 |
| hsa-miR-135a-3p | 363 | 1384 | hsa-miR-4693-5p | 2405 | 3426 |
| hsa-miR-135a-5p | 364 | 1385 | hsa-miR-4694-3p | 2406 | 3427 |
| hsa-miR-135b-3p | 365 | 1386 | hsa-miR-4694-5p | 2407 | 3428 |
| hsa-miR-135b-5p | 366 | 1387 | hsa-miR-4695-3p | 2408 | 3429 |
| hsa-miR-136-3p | 367 | 1388 | hsa-miR-4695-5p | 2409 | 3430 |
| hsa-miR-136-5p | 368 | 1389 | hsa-miR-4696 | 2410 | 3431 |
| hsa-miR-137 | 369 | 1390 | hsa-miR-4697-3p | 2411 | 3432 |
| hsa-miR-138-1-3p | 370 | 1391 | hsa-miR-4697-5p | 2412 | 3433 |
| hsa-miR-138-2-3p | 371 | 1392 | hsa-miR-4698 | 2413 | 3434 |
| hsa-miR-138-5p | 372 | 1393 | hsa-miR-4699-3p | 2414 | 3435 |
| hsa-miR-139-3p | 373 | 1394 | hsa-miR-4699-5p | 2415 | 3436 |
| hsa-miR-139-5p | 374 | 1395 | hsa-miR-4700-3p | 2416 | 3437 |
| hsa-miR-140-3p | 375 | 1396 | hsa-miR-4700-5p | 2417 | 3438 |
| hsa-miR-140-5p | 376 | 1397 | hsa-miR-4701-3p | 2418 | 3439 |
| hsa-miR-141-3p | 377 | 1398 | hsa-miR-4701-5p | 2419 | 3440 |
| hsa-miR-141-5p | 378 | 1399 | hsa-miR-4703-3p | 2420 | 3441 |
| hsa-miR-142-3p | 379 | 1400 | hsa-miR-4703-5p | 2421 | 3442 |
| hsa-miR-142-5p | 380 | 1401 | hsa-miR-4704-3p | 2422 | 3443 |
| hsa-miR-143-3p | 381 | 1402 | hsa-miR-4704-5p | 2423 | 3444 |
| hsa-miR-143-5p | 382 | 1403 | hsa-miR-4705 | 2424 | 3445 |
| hsa-miR-144-3p | 383 | 1404 | hsa-miR-4706 | 2425 | 3446 |
| hsa-miR-144-5p | 384 | 1405 | hsa-miR-4707-3p | 2426 | 3447 |
| hsa-miR-145-3p | 385 | 1406 | hsa-miR-4707-5p | 2427 | 3448 |
| hsa-miR-145-5p | 386 | 1407 | hsa-miR-4708-3p | 2428 | 3449 |
| hsa-miR-1468 | 387 | 1408 | hsa-miR-4708-5p | 2429 | 3450 |
| hsa-miR-1469 | 388 | 1409 | hsa-miR-4709-3p | 2430 | 3451 |
| hsa-miR-146a-3p | 389 | 1410 | hsa-miR-4709-5p | 2431 | 3452 |
| hsa-miR-146a-5p | 390 | 1411 | hsa-miR-4710 | 2432 | 3453 |
| hsa-miR-146b-3p | 391 | 1412 | hsa-miR-4711-3p | 2433 | 3454 |
| hsa-miR-146b-5p | 392 | 1413 | hsa-miR-4711-5p | 2434 | 3455 |
| hsa-miR-1470 | 393 | 1414 | hsa-miR-4712-3p | 2435 | 3456 |
| hsa-miR-1471 | 394 | 1415 | hsa-miR-4712-5p | 2436 | 3457 |
| hsa-miR-147a | 395 | 1416 | hsa-miR-4713-3p | 2437 | 3458 |
| hsa-miR-147b | 396 | 1417 | hsa-miR-4713-5p | 2438 | 3459 |
| hsa-miR-148a-3p | 397 | 1418 | hsa-miR-4714-3p | 2439 | 3460 |
| hsa-miR-148a-5p | 398 | 1419 | hsa-miR-4714-5p | 2440 | 3461 |
| hsa-miR-148b-3p | 399 | 1420 | hsa-miR-4715-3p | 2441 | 3462 |
| hsa-miR-148b-5p | 400 | 1421 | hsa-miR-4715-5p | 2442 | 3463 |
| hsa-miR-149-3p | 401 | 1422 | hsa-miR-4716-3p | 2443 | 3464 |
| hsa-miR-149-5p | 402 | 1423 | hsa-miR-4716-5p | 2444 | 3465 |
| hsa-miR-150-3p | 403 | 1424 | hsa-miR-4717-3p | 2445 | 3466 |
| hsa-miR-150-5p | 404 | 1425 | hsa-miR-4717-5p | 2446 | 3467 |
| hsa-miR-151a-3p | 405 | 1426 | hsa-miR-4718 | 2447 | 3468 |
| hsa-miR-151a-5p | 406 | 1427 | hsa-miR-4719 | 2448 | 3469 |
| hsa-miR-151b | 407 | 1428 | hsa-miR-4720-3p | 2449 | 3470 |
| hsa-miR-152 | 408 | 1429 | hsa-miR-4720-5p | 2450 | 3471 |
| hsa-miR-153 | 409 | 1430 | hsa-miR-4721 | 2451 | 3472 |
| hsa-miR-1537 | 410 | 1431 | hsa-miR-4722-3p | 2452 | 3473 |
| hsa-miR-1538 | 411 | 1432 | hsa-miR-4722-5p | 2453 | 3474 |
| hsa-miR-1539 | 412 | 1433 | hsa-miR-4723-3p | 2454 | 3475 |
| hsa-miR-154-3p | 413 | 1434 | hsa-miR-4723-5p | 2455 | 3476 |
| hsa-miR-154-5p | 414 | 1435 | hsa-miR-4724-3p | 2456 | 3477 |
| hsa-miR-155-3p | 415 | 1436 | hsa-miR-4724-5p | 2457 | 3478 |
| hsa-miR-155-5p | 416 | 1437 | hsa-miR-4725-3p | 2458 | 3479 |
| hsa-miR-1587 | 417 | 1438 | hsa-miR-4725-5p | 2459 | 3480 |
| hsa-miR-15a-3p | 418 | 1439 | hsa-miR-4726-3p | 2460 | 3481 |
| hsa-miR-15a-5p | 419 | 1440 | hsa-miR-4726-5p | 2461 | 3482 |
| hsa-miR-15b-3p | 420 | 1441 | hsa-miR-4727-3p | 2462 | 3483 |
| hsa-miR-15b-5p | 421 | 1442 | hsa-miR-4727-5p | 2463 | 3484 |
| hsa-miR-16-1-3p | 422 | 1443 | hsa-miR-4728-3p | 2464 | 3485 |
| hsa-miR-16-2-3p | 423 | 1444 | hsa-miR-4728-5p | 2465 | 3486 |
| hsa-miR-16-5p | 424 | 1445 | hsa-miR-4729 | 2466 | 3487 |
| hsa-miR-17-3p | 425 | 1446 | hsa-miR-4730 | 2467 | 3488 |
| hsa-miR-17-5p | 426 | 1447 | hsa-miR-4731-3p | 2468 | 3489 |
| hsa-miR-181a-2-3p | 427 | 1448 | hsa-miR-4731-5p | 2469 | 3490 |
| hsa-miR-181a-3p | 428 | 1449 | hsa-miR-4732-3p | 2470 | 3491 |
| hsa-miR-181a-5p | 429 | 1450 | hsa-miR-4732-5p | 2471 | 3492 |
| hsa-miR-181b-3p | 430 | 1451 | hsa-miR-4733-3p | 2472 | 3493 |
| hsa-miR-181b-5p | 431 | 1452 | hsa-miR-4733-5p | 2473 | 3494 |
| hsa-miR-181c-3p | 432 | 1453 | hsa-miR-4734 | 2474 | 3495 |
| hsa-miR-181c-5p | 433 | 1454 | hsa-miR-4735-3p | 2475 | 3496 |
| hsa-miR-181d | 434 | 1455 | hsa-miR-4735-5p | 2476 | 3497 |
| hsa-miR-182-3p | 435 | 1456 | hsa-miR-4736 | 2477 | 3498 |
| hsa-miR-1825 | 436 | 1457 | hsa-miR-4737 | 2478 | 3499 |
| hsa-miR-182-5p | 437 | 1458 | hsa-miR-4738-3p | 2479 | 3500 |
| hsa-miR-1827 | 438 | 1459 | hsa-miR-4738-5p | 2480 | 3501 |
| hsa-miR-183-3p | 439 | 1460 | hsa-miR-4739 | 2481 | 3502 |
| hsa-miR-183-5p | 440 | 1461 | hsa-miR-4740-3p | 2482 | 3503 |
| hsa-miR-184 | 441 | 1462 | hsa-miR-4740-5p | 2483 | 3504 |
| hsa-miR-185-3p | 442 | 1463 | hsa-miR-4741 | 2484 | 3505 |
| hsa-miR-185-5p | 443 | 1464 | hsa-miR-4742-3p | 2485 | 3506 |
| hsa-miR-186-3p | 444 | 1465 | hsa-miR-4742-5p | 2486 | 3507 |
| hsa-miR-186-5p | 445 | 1466 | hsa-miR-4743-3p | 2487 | 3508 |
| hsa-miR-187-3p | 446 | 1467 | hsa-miR-4743-5p | 2488 | 3509 |
| hsa-miR-187-5p | 447 | 1468 | hsa-miR-4744 | 2489 | 3510 |
| hsa-miR-188-3p | 448 | 1469 | hsa-miR-4745-3p | 2490 | 3511 |
| hsa-miR-188-5p | 449 | 1470 | hsa-miR-4745-5p | 2491 | 3512 |
| hsa-miR-18a-3p | 450 | 1471 | hsa-miR-4746-3p | 2492 | 3513 |
| hsa-miR-18a-5p | 451 | 1472 | hsa-miR-4746-5p | 2493 | 3514 |
| hsa-miR-18b-3p | 452 | 1473 | hsa-miR-4747-3p | 2494 | 3515 |
| hsa-miR-18b-5p | 453 | 1474 | hsa-miR-4747-5p | 2495 | 3516 |
| hsa-miR-1908 | 454 | 1475 | hsa-miR-4748 | 2496 | 3517 |
| hsa-miR-1909-3p | 455 | 1476 | hsa-miR-4749-3p | 2497 | 3518 |
| hsa-miR-1909-5p | 456 | 1477 | hsa-miR-4749-5p | 2498 | 3519 |
| hsa-miR-190a | 457 | 1478 | hsa-miR-4750-3p | 2499 | 3520 |
| hsa-miR-190b | 458 | 1479 | hsa-miR-4750-5p | 2500 | 3521 |
| hsa-miR-1910 | 459 | 1480 | hsa-miR-4751 | 2501 | 3522 |
| hsa-miR-1911-3p | 460 | 1481 | hsa-miR-4752 | 2502 | 3523 |
| hsa-miR-1911-5p | 461 | 1482 | hsa-miR-4753-3p | 2503 | 3524 |
| hsa-miR-1912 | 462 | 1483 | hsa-miR-4753-5p | 2504 | 3525 |
| hsa-miR-1913 | 463 | 1484 | hsa-miR-4754 | 2505 | 3526 |
| hsa-miR-191-3p | 464 | 1485 | hsa-miR-4755-3p | 2506 | 3527 |
| hsa-miR-1914-3p | 465 | 1486 | hsa-miR-4755-5p | 2507 | 3528 |
| hsa-miR-1914-5p | 466 | 1487 | hsa-miR-4756-3p | 2508 | 3529 |
| hsa-miR-1915-3p | 467 | 1488 | hsa-miR-4756-5p | 2509 | 3530 |
| hsa-miR-1915-5p | 468 | 1489 | hsa-miR-4757-3p | 2510 | 3531 |
| hsa-miR-191-5p | 469 | 1490 | hsa-miR-4757-5p | 2511 | 3532 |
| hsa-miR-192-3p | 470 | 1491 | hsa-miR-4758-3p | 2512 | 3533 |
| hsa-miR-192-5p | 471 | 1492 | hsa-miR-4758-5p | 2513 | 3534 |
| hsa-miR-193a-3p | 472 | 1493 | hsa-miR-4759 | 2514 | 3535 |
| hsa-miR-193a-5p | 473 | 1494 | hsa-miR-4760-3p | 2515 | 3536 |
| hsa-miR-193b-3p | 474 | 1495 | hsa-miR-4760-5p | 2516 | 3537 |
| hsa-miR-193b-5p | 475 | 1496 | hsa-miR-4761-3p | 2517 | 3538 |
| hsa-miR-194-3p | 476 | 1497 | hsa-miR-4761-5p | 2518 | 3539 |
| hsa-miR-194-5p | 477 | 1498 | hsa-miR-4762-3p | 2519 | 3540 |
| hsa-miR-195-3p | 478 | 1499 | hsa-miR-4762-5p | 2520 | 3541 |
| hsa-miR-195-5p | 479 | 1500 | hsa-miR-4763-3p | 2521 | 3542 |
| hsa-miR-196a-3p | 480 | 1501 | hsa-miR-4763-5p | 2522 | 3543 |
| hsa-miR-196a-5p | 481 | 1502 | hsa-miR-4764-3p | 2523 | 3544 |
| hsa-miR-196b-3p | 482 | 1503 | hsa-miR-4764-5p | 2524 | 3545 |
| hsa-miR-196b-5p | 483 | 1504 | hsa-miR-4765 | 2525 | 3546 |
| hsa-miR-1972 | 484 | 1505 | hsa-miR-4766-3p | 2526 | 3547 |
| hsa-miR-1973 | 485 | 1506 | hsa-miR-4766-5p | 2527 | 3548 |
| hsa-miR-197-3p | 486 | 1507 | hsa-miR-4767 | 2528 | 3549 |
| hsa-miR-197-5p | 487 | 1508 | hsa-miR-4768-3p | 2529 | 3550 |
| hsa-miR-1976 | 488 | 1509 | hsa-miR-4768-5p | 2530 | 3551 |
| hsa-miR-198 | 489 | 1510 | hsa-miR-4769-3p | 2531 | 3552 |
| hsa-miR-199a-3p | 490 | 1511 | hsa-miR-4769-5p | 2532 | 3553 |
| hsa-miR-199a-5p | 491 | 1512 | hsa-miR-4770 | 2533 | 3554 |
| hsa-miR-199b-3p | 492 | 1513 | hsa-miR-4771 | 2534 | 3555 |
| hsa-miR-199b-5p | 493 | 1514 | hsa-miR-4772-3p | 2535 | 3556 |
| hsa-miR-19a-3p | 494 | 1515 | hsa-miR-4772-5p | 2536 | 3557 |
| hsa-miR-19a-5p | 495 | 1516 | hsa-miR-4773 | 2537 | 3558 |
| hsa-miR-19b-1-5p | 496 | 1517 | hsa-miR-4774-3p | 2538 | 3559 |
| hsa-miR-19b-2-5p | 497 | 1518 | hsa-miR-4774-5p | 2539 | 3560 |
| hsa-miR-19b-3p | 498 | 1519 | hsa-miR-4775 | 2540 | 3561 |
| hsa-miR-200a-3p | 499 | 1520 | hsa-miR-4776-3p | 2541 | 3562 |
| hsa-miR-200a-5p | 500 | 1521 | hsa-miR-4776-5p | 2542 | 3563 |
| hsa-miR-200b-3p | 501 | 1522 | hsa-miR-4777-3p | 2543 | 3564 |
| hsa-miR-200b-5p | 502 | 1523 | hsa-miR-4777-5p | 2544 | 3565 |
| hsa-miR-200c-3p | 503 | 1524 | hsa-miR-4778-3p | 2545 | 3566 |
| hsa-miR-200c-5p | 504 | 1525 | hsa-miR-4778-5p | 2546 | 3567 |
| hsa-miR-202-3p | 505 | 1526 | hsa-miR-4779 | 2547 | 3568 |
| hsa-miR-202-5p | 506 | 1527 | hsa-miR-4780 | 2548 | 3569 |
| hsa-miR-203a | 507 | 1528 | hsa-miR-4781-3p | 2549 | 3570 |
| hsa-miR-203b-3p | 508 | 1529 | hsa-miR-4781-5p | 2550 | 3571 |
| hsa-miR-203b-5p | 509 | 1530 | hsa-miR-4782-3p | 2551 | 3572 |
| hsa-miR-204-3p | 510 | 1531 | hsa-miR-4782-5p | 2552 | 3573 |
| hsa-miR-204-5p | 511 | 1532 | hsa-miR-4783-3p | 2553 | 3574 |
| hsa-miR-2052 | 512 | 1533 | hsa-miR-4783-5p | 2554 | 3575 |
| hsa-miR-2053 | 513 | 1534 | hsa-miR-4784 | 2555 | 3576 |
| hsa-miR-205-3p | 514 | 1535 | hsa-miR-4785 | 2556 | 3577 |
| hsa-miR-2054 | 515 | 1536 | hsa-miR-4786-3p | 2557 | 3578 |
| hsa-miR-205-5p | 516 | 1537 | hsa-miR-4786-5p | 2558 | 3579 |
| hsa-miR-206 | 517 | 1538 | hsa-miR-4787-3p | 2559 | 3580 |
| hsa-miR-208a | 518 | 1539 | hsa-miR-4787-5p | 2560 | 3581 |
| hsa-miR-208b | 519 | 1540 | hsa-miR-4788 | 2561 | 3582 |
| hsa-miR-20a-3p | 520 | 1541 | hsa-miR-4789-3p | 2562 | 3583 |
| hsa-miR-20a-5p | 521 | 1542 | hsa-miR-4789-5p | 2563 | 3584 |
| hsa-miR-20b-3p | 522 | 1543 | hsa-miR-4790-3p | 2564 | 3585 |
| hsa-miR-20b-5p | 523 | 1544 | hsa-miR-4790-5p | 2565 | 3586 |
| hsa-miR-210 | 524 | 1545 | hsa-miR-4791 | 2566 | 3587 |
| hsa-miR-2110 | 525 | 1546 | hsa-miR-4792 | 2567 | 3588 |
| hsa-miR-2113 | 526 | 1547 | hsa-miR-4793-3p | 2568 | 3589 |
| hsa-miR-211-3p | 527 | 1548 | hsa-miR-4793-5p | 2569 | 3590 |
| hsa-miR-2114-3p | 528 | 1549 | hsa-miR-4794 | 2570 | 3591 |
| hsa-miR-2114-5p | 529 | 1550 | hsa-miR-4795-3p | 2571 | 3592 |
| hsa-miR-2115-3p | 530 | 1551 | hsa-miR-4795-5p | 2572 | 3593 |
| hsa-miR-2115-5p | 531 | 1552 | hsa-miR-4796-3p | 2573 | 3594 |
| hsa-miR-211-5p | 532 | 1553 | hsa-miR-4796-5p | 2574 | 3595 |
| hsa-miR-2116-3p | 533 | 1554 | hsa-miR-4797-3p | 2575 | 3596 |
| hsa-miR-2116-5p | 534 | 1555 | hsa-miR-4797-5p | 2576 | 3597 |
| hsa-miR-2117 | 535 | 1556 | hsa-miR-4798-3p | 2577 | 3598 |
| hsa-miR-212-3p | 536 | 1557 | hsa-miR-4798-5p | 2578 | 3599 |
| hsa-miR-212-5p | 537 | 1558 | hsa-miR-4799-3p | 2579 | 3600 |
| hsa-miR-21-3p | 538 | 1559 | hsa-miR-4799-5p | 2580 | 3601 |
| hsa-miR-214-3p | 539 | 1560 | hsa-miR-4800-3p | 2581 | 3602 |
| hsa-miR-214-5p | 540 | 1561 | hsa-miR-4800-5p | 2582 | 3603 |
| hsa-miR-215 | 541 | 1562 | hsa-miR-4801 | 2583 | 3604 |
| hsa-miR-21-5p | 542 | 1563 | hsa-miR-4802-3p | 2584 | 3605 |
| hsa-miR-216a-3p | 543 | 1564 | hsa-miR-4802-5p | 2585 | 3606 |
| hsa-miR-216a-5p | 544 | 1565 | hsa-miR-4803 | 2586 | 3607 |
| hsa-miR-216b | 545 | 1566 | hsa-miR-4804-3p | 2587 | 3608 |
| hsa-miR-217 | 546 | 1567 | hsa-miR-4804-5p | 2588 | 3609 |
| hsa-miR-218-1-3p | 547 | 1568 | hsa-miR-483-3p | 2589 | 3610 |
| hsa-miR-218-2-3p | 548 | 1569 | hsa-miR-483-5p | 2590 | 3611 |
| hsa-miR-218-5p | 549 | 1570 | hsa-miR-484 | 2591 | 3612 |
| hsa-miR-219-1-3p | 550 | 1571 | hsa-miR-485-3p | 2592 | 3613 |
| hsa-miR-219-2-3p | 551 | 1572 | hsa-miR-485-5p | 2593 | 3614 |
| hsa-miR-219-5p | 552 | 1573 | hsa-miR-486-3p | 2594 | 3615 |
| hsa-miR-221-3p | 553 | 1574 | hsa-miR-486-5p | 2595 | 3616 |
| hsa-miR-221-5p | 554 | 1575 | hsa-miR-487a | 2596 | 3617 |
| hsa-miR-222-3p | 555 | 1576 | hsa-miR-487b | 2597 | 3618 |
| hsa-miR-222-5p | 556 | 1577 | hsa-miR-488-3p | 2598 | 3619 |
| hsa-miR-223-3p | 557 | 1578 | hsa-miR-488-5p | 2599 | 3620 |
| hsa-miR-223-5p | 558 | 1579 | hsa-miR-489 | 2600 | 3621 |
| hsa-miR-22-3p | 559 | 1580 | hsa-miR-490-3p | 2601 | 3622 |
| hsa-miR-224-3p | 560 | 1581 | hsa-miR-490-5p | 2602 | 3623 |
| hsa-miR-224-5p | 561 | 1582 | hsa-miR-491-3p | 2603 | 3624 |
| hsa-miR-22-5p | 562 | 1583 | hsa-miR-491-5p | 2604 | 3625 |
| hsa-miR-2276 | 563 | 1584 | hsa-miR-492 | 2605 | 3626 |
| hsa-miR-2277-3p | 564 | 1585 | hsa-miR-493-3p | 2606 | 3627 |
| hsa-miR-2277-5p | 565 | 1586 | hsa-miR-493-5p | 2607 | 3628 |
| hsa-miR-2278 | 566 | 1587 | hsa-miR-494 | 2608 | 3629 |
| hsa-miR-2355-3p | 567 | 1588 | hsa-miR-495-3p | 2609 | 3630 |
| hsa-miR-2355-5p | 568 | 1589 | hsa-miR-495-5p | 2610 | 3631 |
| hsa-miR-2392 | 569 | 1590 | hsa-miR-496 | 2611 | 3632 |
| hsa-miR-23a-3p | 570 | 1591 | hsa-miR-497-3p | 2612 | 3633 |
| hsa-miR-23a-5p | 571 | 1592 | hsa-miR-497-5p | 2613 | 3634 |
| hsa-miR-23b-3p | 572 | 1593 | hsa-miR-498 | 2614 | 3635 |
| hsa-miR-23b-5p | 573 | 1594 | hsa-miR-4999-3p | 2615 | 3636 |
| hsa-miR-23c | 574 | 1595 | hsa-miR-4999-5p | 2616 | 3637 |
| hsa-miR-24-1-5p | 575 | 1596 | hsa-miR-499a-3p | 2617 | 3638 |
| hsa-miR-24-2-5p | 576 | 1597 | hsa-miR-499a-5p | 2618 | 3639 |
| hsa-miR-24-3p | 577 | 1598 | hsa-miR-499b-3p | 2619 | 3640 |
| hsa-miR-2467-3p | 578 | 1599 | hsa-miR-499b-5p | 2620 | 3641 |
| hsa-miR-2467-5p | 579 | 1600 | hsa-miR-5000-3p | 2621 | 3642 |
| hsa-miR-25-3p | 580 | 1601 | hsa-miR-5000-5p | 2622 | 3643 |
| hsa-miR-25-5p | 581 | 1602 | hsa-miR-5001-3p | 2623 | 3644 |
| hsa-miR-2681-3p | 582 | 1603 | hsa-miR-5001-5p | 2624 | 3645 |
| hsa-miR-2681-5p | 583 | 1604 | hsa-miR-5002-3p | 2625 | 3646 |
| hsa-miR-2682-3p | 584 | 1605 | hsa-miR-5002-5p | 2626 | 3647 |
| hsa-miR-2682-5p | 585 | 1606 | hsa-miR-5003-3p | 2627 | 3648 |
| hsa-miR-26a-1-3p | 586 | 1607 | hsa-miR-5003-5p | 2628 | 3649 |
| hsa-miR-26a-2-3p | 587 | 1608 | hsa-miR-5004-3p | 2629 | 3650 |
| hsa-miR-26a-5p | 588 | 1609 | hsa-miR-5004-5p | 2630 | 3651 |
| hsa-miR-26b-3p | 589 | 1610 | hsa-miR-5006-3p | 2631 | 3652 |
| hsa-miR-26b-5p | 590 | 1611 | hsa-miR-5006-5p | 2632 | 3653 |
| hsa-miR-27a-3p | 591 | 1612 | hsa-miR-5007-3p | 2633 | 3654 |
| hsa-miR-27a-5p | 592 | 1613 | hsa-miR-5007-5p | 2634 | 3655 |
| hsa-miR-27b-3p | 593 | 1614 | hsa-miR-5008-3p | 2635 | 3656 |
| hsa-miR-27b-5p | 594 | 1615 | hsa-miR-5008-5p | 2636 | 3657 |
| hsa-miR-28-3p | 595 | 1616 | hsa-miR-5009-3p | 2637 | 3658 |
| hsa-miR-28-5p | 596 | 1617 | hsa-miR-5009-5p | 2638 | 3659 |
| hsa-miR-2861 | 597 | 1618 | hsa-miR-500a-3p | 2639 | 3660 |
| hsa-miR-2909 | 598 | 1619 | hsa-miR-500a-5p | 2640 | 3661 |
| hsa-miR-296-3p | 599 | 1620 | hsa-miR-500b | 2641 | 3662 |
| hsa-miR-2964a-3p | 600 | 1621 | hsa-miR-5010-3p | 2642 | 3663 |
| hsa-miR-2964a-5p | 601 | 1622 | hsa-miR-5010-5p | 2643 | 3664 |
| hsa-miR-296-5p | 602 | 1623 | hsa-miR-5011-3p | 2644 | 3665 |
| hsa-miR-297 | 603 | 1624 | hsa-miR-5011-5p | 2645 | 3666 |
| hsa-miR-298 | 604 | 1625 | hsa-miR-501-3p | 2646 | 3667 |
| hsa-miR-299-3p | 605 | 1626 | hsa-miR-501-5p | 2647 | 3668 |
| hsa-miR-299-5p | 606 | 1627 | hsa-miR-502-3p | 2648 | 3669 |
| hsa-miR-29a-3p | 607 | 1628 | hsa-miR-502-5p | 2649 | 3670 |
| hsa-miR-29a-5p | 608 | 1629 | hsa-miR-503-3p | 2650 | 3671 |
| hsa-miR-29b-1-5p | 609 | 1630 | hsa-miR-503-5p | 2651 | 3672 |
| hsa-miR-29b-2-5p | 610 | 1631 | hsa-miR-504 | 2652 | 3673 |
| hsa-miR-29b-3p | 611 | 1632 | hsa-miR-5047 | 2653 | 3674 |
| hsa-miR-29c-3p | 612 | 1633 | hsa-miR-505-3p | 2654 | 3675 |
| hsa-miR-29c-5p | 613 | 1634 | hsa-miR-505-5p | 2655 | 3676 |
| hsa-miR-300 | 614 | 1635 | hsa-miR-506-3p | 2656 | 3677 |
| hsa-miR-301a-3p | 615 | 1636 | hsa-miR-506-5p | 2657 | 3678 |
| hsa-miR-301a-5p | 616 | 1637 | hsa-miR-507 | 2658 | 3679 |
| hsa-miR-301b | 617 | 1638 | hsa-miR-508-3p | 2659 | 3680 |
| hsa-miR-302a-3p | 618 | 1639 | hsa-miR-508-5p | 2660 | 3681 |
| hsa-miR-302a-5p | 619 | 1640 | hsa-miR-5087 | 2661 | 3682 |
| hsa-miR-302b-3p | 620 | 1641 | hsa-miR-5088 | 2662 | 3683 |
| hsa-miR-302b-5p | 621 | 1642 | hsa-miR-5089-3p | 2663 | 3684 |
| hsa-miR-302c-3p | 622 | 1643 | hsa-miR-5089-5p | 2664 | 3685 |
| hsa-miR-302c-5p | 623 | 1644 | hsa-miR-5090 | 2665 | 3686 |
| hsa-miR-302d-3p | 624 | 1645 | hsa-miR-5091 | 2666 | 3687 |
| hsa-miR-302d-5p | 625 | 1646 | hsa-miR-5092 | 2667 | 3688 |
| hsa-miR-302e | 626 | 1647 | hsa-miR-5093 | 2668 | 3689 |
| hsa-miR-302f | 627 | 1648 | hsa-miR-509-3-5p | 2669 | 3690 |
| hsa-miR-3064-3p | 628 | 1649 | hsa-miR-509-3p | 2670 | 3691 |
| hsa-miR-3064-5p | 629 | 1650 | hsa-miR-5094 | 2671 | 3692 |
| hsa-miR-3065-3p | 630 | 1651 | hsa-miR-5095 | 2672 | 3693 |
| hsa-miR-3065-5p | 631 | 1652 | hsa-miR-509-5p | 2673 | 3694 |
| hsa-miR-3074-3p | 632 | 1653 | hsa-miR-5096 | 2674 | 3695 |
| hsa-miR-3074-5p | 633 | 1654 | hsa-miR-510 | 2675 | 3696 |
| hsa-miR-30a-3p | 634 | 1655 | hsa-miR-5100 | 2676 | 3697 |
| hsa-miR-30a-5p | 635 | 1656 | hsa-miR-511 | 2677 | 3698 |
| hsa-miR-30b-3p | 636 | 1657 | hsa-miR-512-3p | 2678 | 3699 |
| hsa-miR-30b-5p | 637 | 1658 | hsa-miR-512-5p | 2679 | 3700 |
| hsa-miR-30c-1-3p | 638 | 1659 | hsa-miR-513a-3p | 2680 | 3701 |
| hsa-miR-30c-2-3p | 639 | 1660 | hsa-miR-513a-5p | 2681 | 3702 |
| hsa-miR-30c-5p | 640 | 1661 | hsa-miR-513b | 2682 | 3703 |
| hsa-miR-30d-3p | 641 | 1662 | hsa-miR-513c-3p | 2683 | 3704 |
| hsa-miR-30d-5p | 642 | 1663 | hsa-miR-513c-5p | 2684 | 3705 |
| hsa-miR-30e-3p | 643 | 1664 | hsa-miR-514a-3p | 2685 | 3706 |
| hsa-miR-30e-5p | 644 | 1665 | hsa-miR-514a-5p | 2686 | 3707 |
| hsa-miR-3115 | 645 | 1666 | hsa-miR-514b-3p | 2687 | 3708 |
| hsa-miR-3116 | 646 | 1667 | hsa-miR-514b-5p | 2688 | 3709 |
| hsa-miR-3117-3p | 647 | 1668 | hsa-miR-515-3p | 2689 | 3710 |
| hsa-miR-3117-5p | 648 | 1669 | hsa-miR-515-5p | 2690 | 3711 |
| hsa-miR-3118 | 649 | 1670 | hsa-miR-516a-3p | 2691 | 3712 |
| hsa-miR-3119 | 650 | 1671 | hsa-miR-516a-5p | 2692 | 3713 |
| hsa-miR-3120-3p | 651 | 1672 | hsa-miR-516b-3p | 2693 | 3714 |
| hsa-miR-3120-5p | 652 | 1673 | hsa-miR-516b-5p | 2694 | 3715 |
| hsa-miR-3121-3p | 653 | 1674 | hsa-miR-517-5p | 2695 | 3716 |
| hsa-miR-3121-5p | 654 | 1675 | hsa-miR-517a-3p | 2696 | 3717 |
| hsa-miR-3122 | 655 | 1676 | hsa-miR-517b-3p | 2697 | 3718 |
| hsa-miR-3123 | 656 | 1677 | hsa-miR-517c-3p | 2698 | 3719 |
| hsa-miR-3124-3p | 657 | 1678 | hsa-miR-5186 | 2699 | 3720 |
| hsa-miR-3124-5p | 658 | 1679 | hsa-miR-5187-3p | 2700 | 3721 |
| hsa-miR-3125 | 659 | 1680 | hsa-miR-5187-5p | 2701 | 3722 |
| hsa-miR-3126-3p | 660 | 1681 | hsa-miR-5188 | 2702 | 3723 |
| hsa-miR-3126-5p | 661 | 1682 | hsa-miR-5189 | 2703 | 3724 |
| hsa-miR-3127-3p | 662 | 1683 | hsa-miR-518a-3p | 2704 | 3725 |
| hsa-miR-3127-5p | 663 | 1684 | hsa-miR-518a-5p | 2705 | 3726 |
| hsa-miR-3128 | 664 | 1685 | hsa-miR-518b | 2706 | 3727 |
| hsa-miR-3129-3p | 665 | 1686 | hsa-miR-518c-3p | 2707 | 3728 |
| hsa-miR-3129-5p | 666 | 1687 | hsa-miR-518c-5p | 2708 | 3729 |
| hsa-miR-3130-3p | 667 | 1688 | hsa-miR-518d-3p | 2709 | 3730 |
| hsa-miR-3130-5p | 668 | 1689 | hsa-miR-518d-5p | 2710 | 3731 |
| hsa-miR-3131 | 669 | 1690 | hsa-miR-518e-3p | 2711 | 3732 |
| hsa-miR-3132 | 670 | 1691 | hsa-miR-518e-5p | 2712 | 3733 |
| hsa-miR-3133 | 671 | 1692 | hsa-miR-518f-3p | 2713 | 3734 |
| hsa-miR-3134 | 672 | 1693 | hsa-miR-518f-5p | 2714 | 3735 |
| hsa-miR-3135a | 673 | 1694 | hsa-miR-5190 | 2715 | 3736 |
| hsa-miR-3135b | 674 | 1695 | hsa-miR-5191 | 2716 | 3737 |
| hsa-miR-3136-3p | 675 | 1696 | hsa-miR-5192 | 2717 | 3738 |
| hsa-miR-3136-5p | 676 | 1697 | hsa-miR-5193 | 2718 | 3739 |
| hsa-miR-3137 | 677 | 1698 | hsa-miR-5194 | 2719 | 3740 |
| hsa-miR-3138 | 678 | 1699 | hsa-miR-5195-3p | 2720 | 3741 |
| hsa-miR-3139 | 679 | 1700 | hsa-miR-5195-5p | 2721 | 3742 |
| hsa-miR-31-3p | 680 | 1701 | hsa-miR-5196-3p | 2722 | 3743 |
| hsa-miR-3140-3p | 681 | 1702 | hsa-miR-5196-5p | 2723 | 3744 |
| hsa-miR-3140-5p | 682 | 1703 | hsa-miR-5197-3p | 2724 | 3745 |
| hsa-miR-3141 | 683 | 1704 | hsa-miR-5197-5p | 2725 | 3746 |
| hsa-miR-3142 | 684 | 1705 | hsa-miR-519a-3p | 2726 | 3747 |
| hsa-miR-3143 | 685 | 1706 | hsa-miR-519a-5p | 2727 | 3748 |
| hsa-miR-3144-3p | 686 | 1707 | hsa-miR-519b-3p | 2728 | 3749 |
| hsa-miR-3144-5p | 687 | 1708 | hsa-miR-519b-5p | 2729 | 3750 |
| hsa-miR-3145-3p | 688 | 1709 | hsa-miR-519c-3p | 2730 | 3751 |
| hsa-miR-3145-5p | 689 | 1710 | hsa-miR-519c-5p | 2731 | 3752 |
| hsa-miR-3146 | 690 | 1711 | hsa-miR-519d | 2732 | 3753 |
| hsa-miR-3147 | 691 | 1712 | hsa-miR-519e-3p | 2733 | 3754 |
| hsa-miR-3148 | 692 | 1713 | hsa-miR-519e-5p | 2734 | 3755 |
| hsa-miR-3149 | 693 | 1714 | hsa-miR-520a-3p | 2735 | 3756 |
| hsa-miR-3150a-3p | 694 | 1715 | hsa-miR-520a-5p | 2736 | 3757 |
| hsa-miR-3150a-5p | 695 | 1716 | hsa-miR-520b | 2737 | 3758 |
| hsa-miR-3150b-3p | 696 | 1717 | hsa-miR-520c-3p | 2738 | 3759 |
| hsa-miR-3150b-5p | 697 | 1718 | hsa-miR-520c-5p | 2739 | 3760 |
| hsa-miR-3151 | 698 | 1719 | hsa-miR-520d-3p | 2740 | 3761 |
| hsa-miR-3152-3p | 699 | 1720 | hsa-miR-520d-5p | 2741 | 3762 |
| hsa-miR-3152-5p | 700 | 1721 | hsa-miR-520e | 2742 | 3763 |
| hsa-miR-3153 | 701 | 1722 | hsa-miR-520f | 2743 | 3764 |
| hsa-miR-3154 | 702 | 1723 | hsa-miR-520g | 2744 | 3765 |
| hsa-miR-3155a | 703 | 1724 | hsa-miR-520h | 2745 | 3766 |
| hsa-miR-3155b | 704 | 1725 | hsa-miR-521 | 2746 | 3767 |
| hsa-miR-3156-3p | 705 | 1726 | hsa-miR-522-3p | 2747 | 3768 |
| hsa-miR-3156-5p | 706 | 1727 | hsa-miR-522-5p | 2748 | 3769 |
| hsa-miR-3157-3p | 707 | 1728 | hsa-miR-523-3p | 2749 | 3770 |
| hsa-miR-3157-5p | 708 | 1729 | hsa-miR-523-5p | 2750 | 3771 |
| hsa-miR-3158-3p | 709 | 1730 | hsa-miR-524-3p | 2751 | 3772 |
| hsa-miR-3158-5p | 710 | 1731 | hsa-miR-524-5p | 2752 | 3773 |
| hsa-miR-3159 | 711 | 1732 | hsa-miR-525-3p | 2753 | 3774 |
| hsa-miR-31-5p | 712 | 1733 | hsa-miR-525-5p | 2754 | 3775 |
| hsa-miR-3160-3p | 713 | 1734 | hsa-miR-526a | 2755 | 3776 |
| hsa-miR-3160-5p | 714 | 1735 | hsa-miR-526b-3p | 2756 | 3777 |
| hsa-miR-3161 | 715 | 1736 | hsa-miR-526b-5p | 2757 | 3778 |
| hsa-miR-3162-3p | 716 | 1737 | hsa-miR-527 | 2758 | 3779 |
| hsa-miR-3162-5p | 717 | 1738 | hsa-miR-532-3p | 2759 | 3780 |
| hsa-miR-3163 | 718 | 1739 | hsa-miR-532-5p | 2760 | 3781 |
| hsa-miR-3164 | 719 | 1740 | hsa-miR-539-3p | 2761 | 3782 |
| hsa-miR-3165 | 720 | 1741 | hsa-miR-539-5p | 2762 | 3783 |
| hsa-miR-3166 | 721 | 1742 | hsa-miR-541-3p | 2763 | 3784 |
| hsa-miR-3167 | 722 | 1743 | hsa-miR-541-5p | 2764 | 3785 |
| hsa-miR-3168 | 723 | 1744 | hsa-miR-542-3p | 2765 | 3786 |
| hsa-miR-3169 | 724 | 1745 | hsa-miR-542-5p | 2766 | 3787 |
| hsa-miR-3170 | 725 | 1746 | hsa-miR-543 | 2767 | 3788 |
| hsa-miR-3171 | 726 | 1747 | hsa-miR-544a | 2768 | 3789 |
| hsa-miR-3173-3p | 727 | 1748 | hsa-miR-544b | 2769 | 3790 |
| hsa-miR-3173-5p | 728 | 1749 | hsa-miR-545-3p | 2770 | 3791 |
| hsa-miR-3174 | 729 | 1750 | hsa-miR-545-5p | 2771 | 3792 |
| hsa-miR-3175 | 730 | 1751 | hsa-miR-548 | 2772 | 3793 |
| hsa-miR-3176 | 731 | 1752 | hsa-miR-548-3p | 2773 | 3794 |
| hsa-miR-3177-3p | 732 | 1753 | hsa-miR-548-5p | 2774 | 3795 |
| hsa-miR-3177-5p | 733 | 1754 | hsa-miR-548a | 2775 | 3796 |
| hsa-miR-3178 | 734 | 1755 | hsa-miR-548a-3p | 2776 | 3797 |
| hsa-miR-3179 | 735 | 1756 | hsa-miR-548a-5p | 2111 | 3798 |
| hsa-miR-3180 | 736 | 1757 | hsa-miR-548aa | 2778 | 3799 |
| hsa-miR-3180-3p | 737 | 1758 | hsa-miR-548ab | 2779 | 3800 |
| hsa-miR-3180-5p | 738 | 1759 | hsa-miR-548ac | 2780 | 3801 |
| hsa-miR-3181 | 739 | 1760 | hsa-miR-548ad | 2781 | 3802 |
| hsa-miR-3182 | 740 | 1761 | hsa-miR-548ae | 2782 | 3803 |
| hsa-miR-3183 | 741 | 1762 | hsa-miR-548ag | 2783 | 3804 |
| hsa-miR-3184-3p | 742 | 1763 | hsa-miR-548ah-3p | 2784 | 3805 |
| hsa-miR-3184-5p | 743 | 1764 | hsa-miR-548ah-5p | 2785 | 3806 |
| hsa-miR-3185 | 744 | 1765 | hsa-miR-548ai | 2786 | 3807 |
| hsa-miR-3186-3p | 745 | 1766 | hsa-miR-548aj-3p | 2787 | 3808 |
| hsa-miR-3186-5p | 746 | 1767 | hsa-miR-548aj-5p | 2788 | 3809 |
| hsa-miR-3187-3p | 747 | 1768 | hsa-miR-548ak | 2789 | 3810 |
| hsa-miR-3187-5p | 748 | 1769 | hsa-miR-548al | 2790 | 3811 |
| hsa-miR-3188 | 749 | 1770 | hsa-miR-548am-3p | 2791 | 3812 |
| hsa-miR-3189-3p | 750 | 1771 | hsa-miR-548am-5p | 2792 | 3813 |
| hsa-miR-3189-5p | 751 | 1772 | hsa-miR-548an | 2793 | 3814 |
| hsa-miR-3190-3p | 752 | 1773 | hsa-miR-548ao-3p | 2794 | 3815 |
| hsa-miR-3190-5p | 753 | 1774 | hsa-miR-548ao-5p | 2795 | 3816 |
| hsa-miR-3191-3p | 754 | 1775 | hsa-miR-548ap-3p | 2796 | 3817 |
| hsa-miR-3191-5p | 755 | 1776 | hsa-miR-548ap-5p | 2797 | 3818 |
| hsa-miR-3192 | 756 | 1777 | hsa-miR-548aq-3p | 2798 | 3819 |
| hsa-miR-3193 | 757 | 1778 | hsa-miR-548aq-5p | 2799 | 3820 |
| hsa-miR-3194-3p | 758 | 1779 | hsa-miR-548ar-3p | 2800 | 3821 |
| hsa-miR-3194-5p | 759 | 1780 | hsa-miR-548ar-5p | 2801 | 3822 |
| hsa-miR-3195 | 760 | 1781 | hsa-miR-548as-3p | 2802 | 3823 |
| hsa-miR-3196 | 761 | 1782 | hsa-miR-548as-5p | 2803 | 3824 |
| hsa-miR-3197 | 762 | 1783 | hsa-miR-548at-3p | 2804 | 3825 |
| hsa-miR-3198 | 763 | 1784 | hsa-miR-548at-5p | 2805 | 3826 |
| hsa-miR-3199 | 764 | 1785 | hsa-miR-548au-3p | 2806 | 3827 |
| hsa-miR-3200-3p | 765 | 1786 | hsa-miR-548au-5p | 2807 | 3828 |
| hsa-miR-3200-5p | 766 | 1787 | hsa-miR-548av-3p | 2808 | 3829 |
| hsa-miR-3201 | 767 | 1788 | hsa-miR-548av-5p | 2809 | 3830 |
| hsa-miR-3202 | 768 | 1789 | hsa-miR-548aw | 2810 | 3831 |
| hsa-miR-320a | 769 | 1790 | hsa-miR-548ay-3p | 2811 | 3832 |
| hsa-miR-320b | 770 | 1791 | hsa-miR-548ay-5p | 2812 | 3833 |
| hsa-miR-320c | 771 | 1792 | hsa-miR-548az-3p | 2813 | 3834 |
| hsa-miR-320d | 772 | 1793 | hsa-miR-548az-5p | 2814 | 3835 |
| hsa-miR-320e | 773 | 1794 | hsa-miR-548b-3p | 2815 | 3836 |
| hsa-miR-323a-3p | 774 | 1795 | hsa-miR-548b-5p | 2816 | 3837 |
| hsa-miR-323a-5p | 775 | 1796 | hsa-miR-548c-3p | 2817 | 3838 |
| hsa-miR-323b-3p | 776 | 1797 | hsa-miR-548c-5p | 2818 | 3839 |
| hsa-miR-323b-5p | 777 | 1798 | hsa-miR-548d-3p | 2819 | 3840 |
| hsa-miR-32-3p | 778 | 1799 | hsa-miR-548d-5p | 2820 | 3841 |
| hsa-miR-324-3p | 779 | 1800 | hsa-miR-548e | 2821 | 3842 |
| hsa-miR-324-5p | 780 | 1801 | hsa-miR-548f | 2822 | 3843 |
| hsa-miR-325 | 781 | 1802 | hsa-miR-548g-3p | 2823 | 3844 |
| hsa-miR-32-5p | 782 | 1803 | hsa-miR-548g-5p | 2824 | 3845 |
| hsa-miR-326 | 783 | 1804 | hsa-miR-548h-3p | 2825 | 3846 |
| hsa-miR-328 | 784 | 1805 | hsa-miR-548h-5p | 2826 | 3847 |
| hsa-miR-329 | 785 | 1806 | hsa-miR-548i | 2827 | 3848 |
| hsa-miR-330-3p | 786 | 1807 | hsa-miR-548j | 2828 | 3849 |
| hsa-miR-330-5p | 787 | 1808 | hsa-miR-548k | 2829 | 3850 |
| hsa-miR-331-3p | 788 | 1809 | hsa-miR-548l | 2830 | 3851 |
| hsa-miR-331-5p | 789 | 1810 | hsa-miR-548m | 2831 | 3852 |
| hsa-miR-335-3p | 790 | 1811 | hsa-miR-548n | 2832 | 3853 |
| hsa-miR-335-5p | 791 | 1812 | hsa-miR-548o-3p | 2833 | 3854 |
| hsa-miR-337-3p | 792 | 1813 | hsa-miR-548o-5p | 2834 | 3855 |
| hsa-miR-337-5p | 793 | 1814 | hsa-miR-548p | 2835 | 3856 |
| hsa-miR-338-3p | 794 | 1815 | hsa-miR-548q | 2836 | 3857 |
| hsa-miR-338-5p | 795 | 1816 | hsa-miR-548s | 2837 | 3858 |
| hsa-miR-339-3p | 796 | 1817 | hsa-miR-548t-3p | 2838 | 3859 |
| hsa-miR-339-5p | 797 | 1818 | hsa-miR-548t-5p | 2839 | 3860 |
| hsa-miR-33a-3p | 798 | 1819 | hsa-miR-548u | 2840 | 3861 |
| hsa-miR-33a-5p | 799 | 1820 | hsa-miR-548w | 2841 | 3862 |
| hsa-miR-33b-3p | 800 | 1821 | hsa-miR-548y | 2842 | 3863 |
| hsa-miR-33b-5p | 801 | 1822 | hsa-miR-548z | 2843 | 3864 |
| hsa-miR-340-3p | 802 | 1823 | hsa-miR-549a | 2844 | 3865 |
| hsa-miR-340-5p | 803 | 1824 | hsa-miR-550a-3-5p | 2845 | 3866 |
| hsa-miR-342-3p | 804 | 1825 | hsa-miR-550a-3p | 2846 | 3867 |
| hsa-miR-342-5p | 805 | 1826 | hsa-miR-550a-5p | 2847 | 3868 |
| hsa-miR-345-3p | 806 | 1827 | hsa-miR-550b-2-5p | 2848 | 3869 |
| hsa-miR-345-5p | 807 | 1828 | hsa-miR-550b-3p | 2849 | 3870 |
| hsa-miR-346 | 808 | 1829 | hsa-miR-551a | 2850 | 3871 |
| hsa-miR-34a-3p | 809 | 1830 | hsa-miR-551b-3p | 2851 | 3872 |
| hsa-miR-34a-5p | 810 | 1831 | hsa-miR-551b-5p | 2852 | 3873 |
| hsa-miR-34b-3p | 811 | 1832 | hsa-miR-552 | 2853 | 3874 |
| hsa-miR-34b-5p | 812 | 1833 | hsa-miR-553 | 2854 | 3875 |
| hsa-miR-34c-3p | 813 | 1834 | hsa-miR-554 | 2855 | 3876 |
| hsa-miR-34c-5p | 814 | 1835 | hsa-miR-555 | 2856 | 3877 |
| hsa-miR-3529-3p | 815 | 1836 | hsa-miR-556-3p | 2857 | 3878 |
| hsa-miR-3529-5p | 816 | 1837 | hsa-miR-556-5p | 2858 | 3879 |
| hsa-miR-3591-3p | 817 | 1838 | hsa-miR-557 | 2859 | 3880 |
| hsa-miR-3591-5p | 818 | 1839 | hsa-miR-5571-3p | 2860 | 3881 |
| hsa-miR-3605-3p | 819 | 1840 | hsa-miR-5571-5p | 2861 | 3882 |
| hsa-miR-3605-5p | 820 | 1841 | hsa-miR-5572 | 2862 | 3883 |
| hsa-miR-3606-3p | 821 | 1842 | hsa-miR-5579-3p | 2863 | 3884 |
| hsa-miR-3606-5p | 822 | 1843 | hsa-miR-5579-5p | 2864 | 3885 |
| hsa-miR-3607-3p | 823 | 1844 | hsa-miR-558 | 2865 | 3886 |
| hsa-miR-3607-5p | 824 | 1845 | hsa-miR-5580-3p | 2866 | 3887 |
| hsa-miR-3609 | 825 | 1846 | hsa-miR-5580-5p | 2867 | 3888 |
| hsa-miR-3610 | 826 | 1847 | hsa-miR-5581-3p | 2868 | 3889 |
| hsa-miR-3611 | 827 | 1848 | hsa-miR-5581-5p | 2869 | 3890 |
| hsa-miR-3612 | 828 | 1849 | hsa-miR-5582-3p | 2870 | 3891 |
| hsa-miR-3613-3p | 829 | 1850 | hsa-miR-5582-5p | 2871 | 3892 |
| hsa-miR-3613-5p | 830 | 1851 | hsa-miR-5583-3p | 2872 | 3893 |
| hsa-miR-361-3p | 831 | 1852 | hsa-miR-5583-5p | 2873 | 3894 |
| hsa-miR-3614-3p | 832 | 1853 | hsa-miR-5584-3p | 2874 | 3895 |
| hsa-miR-3614-5p | 833 | 1854 | hsa-miR-5584-5p | 2875 | 3896 |
| hsa-miR-3615 | 834 | 1855 | hsa-miR-5585-3p | 2876 | 3897 |
| hsa-miR-361-5p | 835 | 1856 | hsa-miR-5585-5p | 2877 | 3898 |
| hsa-miR-3616-3p | 836 | 1857 | hsa-miR-5586-3p | 2878 | 3899 |
| hsa-miR-3616-5p | 837 | 1858 | hsa-miR-5586-5p | 2879 | 3900 |
| hsa-miR-3617-3p | 838 | 1859 | hsa-miR-5587-3p | 2880 | 3901 |
| hsa-miR-3617-5p | 839 | 1860 | hsa-miR-5587-5p | 2881 | 3902 |
| hsa-miR-3618 | 840 | 1861 | hsa-miR-5588-3p | 2882 | 3903 |
| hsa-miR-3619-3p | 841 | 1862 | hsa-miR-5588-5p | 2883 | 3904 |
| hsa-miR-3619-5p | 842 | 1863 | hsa-miR-5589-3p | 2884 | 3905 |
| hsa-miR-3620-3p | 843 | 1864 | hsa-miR-5589-5p | 2885 | 3906 |
| hsa-miR-3620-5p | 844 | 1865 | hsa-miR-559 | 2886 | 3907 |
| hsa-miR-3621 | 845 | 1866 | hsa-miR-5590-3p | 2887 | 3908 |
| hsa-miR-3622a-3p | 846 | 1867 | hsa-miR-5590-5p | 2888 | 3909 |
| hsa-miR-3622a-5p | 847 | 1868 | hsa-miR-5591-3p | 2889 | 3910 |
| hsa-miR-3622b-3p | 848 | 1869 | hsa-miR-5591-5p | 2890 | 3911 |
| hsa-miR-3622b-5p | 849 | 1870 | hsa-miR-561-3p | 2891 | 3912 |
| hsa-miR-362-3p | 850 | 1871 | hsa-miR-561-5p | 2892 | 3913 |
| hsa-miR-362-5p | 851 | 1872 | hsa-miR-562 | 2893 | 3914 |
| hsa-miR-363-3p | 852 | 1873 | hsa-miR-563 | 2894 | 3915 |
| hsa-miR-363-5p | 853 | 1874 | hsa-miR-564 | 2895 | 3916 |
| hsa-miR-3646 | 854 | 1875 | hsa-miR-566 | 2896 | 3917 |
| hsa-miR-3648 | 855 | 1876 | hsa-miR-567 | 2897 | 3918 |
| hsa-miR-3649 | 856 | 1877 | hsa-miR-568 | 2898 | 3919 |
| hsa-miR-3650 | 857 | 1878 | hsa-miR-5680 | 2899 | 3920 |
| hsa-miR-3651 | 858 | 1879 | hsa-miR-5681a | 2900 | 3921 |
| hsa-miR-3652 | 859 | 1880 | hsa-miR-5681b | 2901 | 3922 |
| hsa-miR-3653 | 860 | 1881 | hsa-miR-5682 | 2902 | 3923 |
| hsa-miR-3654 | 861 | 1882 | hsa-miR-5683 | 2903 | 3924 |
| hsa-miR-3655 | 862 | 1883 | hsa-miR-5684 | 2904 | 3925 |
| hsa-miR-3656 | 863 | 1884 | hsa-miR-5685 | 2905 | 3926 |
| hsa-miR-3657 | 864 | 1885 | hsa-miR-5686 | 2906 | 3927 |
| hsa-miR-3658 | 865 | 1886 | hsa-miR-5687 | 2907 | 3928 |
| hsa-miR-3659 | 866 | 1887 | hsa-miR-5688 | 2908 | 3929 |
| hsa-miR-365a-3p | 867 | 1888 | hsa-miR-5689 | 2909 | 3930 |
| hsa-miR-365a-5p | 868 | 1889 | hsa-miR-569 | 2910 | 3931 |
| hsa-miR-365b-3p | 869 | 1890 | hsa-miR-5690 | 2911 | 3932 |
| hsa-miR-365b-5p | 870 | 1891 | hsa-miR-5691 | 2912 | 3933 |
| hsa-miR-3660 | 871 | 1892 | hsa-miR-5692a | 2913 | 3934 |
| hsa-miR-3661 | 872 | 1893 | hsa-miR-5692b | 2914 | 3935 |
| hsa-miR-3662 | 873 | 1894 | hsa-miR-5692c | 2915 | 3936 |
| hsa-miR-3663-3p | 874 | 1895 | hsa-miR-5693 | 2916 | 3937 |
| hsa-miR-3663-5p | 875 | 1896 | hsa-miR-5694 | 2917 | 3938 |
| hsa-miR-3664-3p | 876 | 1897 | hsa-miR-5695 | 2918 | 3939 |
| hsa-miR-3664-5p | 877 | 1898 | hsa-miR-5696 | 2919 | 3940 |
| hsa-miR-3665 | 878 | 1899 | hsa-miR-5697 | 2920 | 3941 |
| hsa-miR-3666 | 879 | 1900 | hsa-miR-5698 | 2921 | 3942 |
| hsa-miR-3667-3p | 880 | 1901 | hsa-miR-5699 | 2922 | 3943 |
| hsa-miR-3667-5p | 881 | 1902 | hsa-miR-5700 | 2923 | 3944 |
| hsa-miR-3668 | 882 | 1903 | hsa-miR-5701 | 2924 | 3945 |
| hsa-miR-3669 | 883 | 1904 | hsa-miR-5702 | 2925 | 3946 |
| hsa-miR-3670 | 884 | 1905 | hsa-miR-5703 | 2926 | 3947 |
| hsa-miR-3671 | 885 | 1906 | hsa-miR-570-3p | 2927 | 3948 |
| hsa-miR-3672 | 886 | 1907 | hsa-miR-5704 | 2928 | 3949 |
| hsa-miR-3673 | 887 | 1908 | hsa-miR-5705 | 2929 | 3950 |
| hsa-miR-367-3p | 888 | 1909 | hsa-miR-570-5p | 2930 | 3951 |
| hsa-miR-3674 | 889 | 1910 | hsa-miR-5706 | 2931 | 3952 |
| hsa-miR-3675-3p | 890 | 1911 | hsa-miR-5707 | 2932 | 3953 |
| hsa-miR-3675-5p | 891 | 1912 | hsa-miR-5708 | 2933 | 3954 |
| hsa-miR-367-5p | 892 | 1913 | hsa-miR-571 | 2934 | 3955 |
| hsa-miR-3676-3p | 893 | 1914 | hsa-miR-572 | 2935 | 3956 |
| hsa-miR-3676-5p | 894 | 1915 | hsa-miR-573 | 2936 | 3957 |
| hsa-miR-3677-3p | 895 | 1916 | hsa-miR-5739 | 2937 | 3958 |
| hsa-miR-3677-5p | 896 | 1917 | hsa-miR-574-3p | 2938 | 3959 |
| hsa-miR-3678-3p | 897 | 1918 | hsa-miR-574-5p | 2939 | 3960 |
| hsa-miR-3678-5p | 898 | 1919 | hsa-miR-575 | 2940 | 3961 |
| hsa-miR-3679-3p | 899 | 1920 | hsa-miR-576-3p | 2941 | 3962 |
| hsa-miR-3679-5p | 900 | 1921 | hsa-miR-576-5p | 2942 | 3963 |
| hsa-miR-3680-3p | 901 | 1922 | hsa-miR-577 | 2943 | 3964 |
| hsa-miR-3680-5p | 902 | 1923 | hsa-miR-578 | 2944 | 3965 |
| hsa-miR-3681-3p | 903 | 1924 | hsa-miR-5787 | 2945 | 3966 |
| hsa-miR-3681-5p | 904 | 1925 | hsa-miR-579 | 2946 | 3967 |
| hsa-miR-3682-3p | 905 | 1926 | hsa-miR-580 | 2947 | 3968 |
| hsa-miR-3682-5p | 906 | 1927 | hsa-miR-581 | 2948 | 3969 |
| hsa-miR-3683 | 907 | 1928 | hsa-miR-582-3p | 2949 | 3970 |
| hsa-miR-3684 | 908 | 1929 | hsa-miR-582-5p | 2950 | 3971 |
| hsa-miR-3685 | 909 | 1930 | hsa-miR-583 | 2951 | 3972 |
| hsa-miR-3686 | 910 | 1931 | hsa-miR-584-3p | 2952 | 3973 |
| hsa-miR-3687 | 911 | 1932 | hsa-miR-584-5p | 2953 | 3974 |
| hsa-miR-3688-3p | 912 | 1933 | hsa-miR-585 | 2954 | 3975 |
| hsa-miR-3688-5p | 913 | 1934 | hsa-miR-586 | 2955 | 3976 |
| hsa-miR-3689a-3p | 914 | 1935 | hsa-miR-587 | 2956 | 3977 |
| hsa-miR-3689a-5p | 915 | 1936 | hsa-miR-588 | 2957 | 3978 |
| hsa-miR-3689b-3p | 916 | 1937 | hsa-miR-589-3p | 2958 | 3979 |
| hsa-miR-3689b-5p | 917 | 1938 | hsa-miR-589-5p | 2959 | 3980 |
| hsa-miR-3689c | 918 | 1939 | hsa-miR-590-3p | 2960 | 3981 |
| hsa-miR-3689d | 919 | 1940 | hsa-miR-590-5p | 2961 | 3982 |
| hsa-miR-3689e | 920 | 1941 | hsa-miR-591 | 2962 | 3983 |
| hsa-miR-3689f | 921 | 1942 | hsa-miR-592 | 2963 | 3984 |
| hsa-miR-3690 | 922 | 1943 | hsa-miR-593-3p | 2964 | 3985 |
| hsa-miR-3691-3p | 923 | 1944 | hsa-miR-593-5p | 2965 | 3986 |
| hsa-miR-3691-5p | 924 | 1945 | hsa-miR-595 | 2966 | 3987 |
| hsa-miR-3692-3p | 925 | 1946 | hsa-miR-596 | 2967 | 3988 |
| hsa-miR-3692-5p | 926 | 1947 | hsa-miR-597 | 2968 | 3989 |
| hsa-miR-369-3p | 927 | 1948 | hsa-miR-598 | 2969 | 3990 |
| hsa-miR-369-5p | 928 | 1949 | hsa-miR-599 | 2970 | 3991 |
| hsa-miR-370 | 929 | 1950 | hsa-miR-600 | 2971 | 3992 |
| hsa-miR-3713 | 930 | 1951 | hsa-miR-601 | 2972 | 3993 |
| hsa-miR-3714 | 931 | 1952 | hsa-miR-602 | 2973 | 3994 |
| hsa-miR-371a-3p | 932 | 1953 | hsa-miR-603 | 2974 | 3995 |
| hsa-miR-371a-5p | 933 | 1954 | hsa-miR-604 | 2975 | 3996 |
| hsa-miR-371b-3p | 934 | 1955 | hsa-miR-605 | 2976 | 3997 |
| hsa-miR-371b-5p | 935 | 1956 | hsa-miR-606 | 2977 | 3998 |
| hsa-miR-372 | 936 | 1957 | hsa-miR-6068 | 2978 | 3999 |
| hsa-miR-373-3p | 937 | 1958 | hsa-miR-6069 | 2979 | 4000 |
| hsa-miR-373-5p | 938 | 1959 | hsa-miR-607 | 2980 | 4001 |
| hsa-miR-374a-3p | 939 | 1960 | hsa-miR-6070 | 2981 | 4002 |
| hsa-miR-374a-5p | 940 | 1961 | hsa-miR-6071 | 2982 | 4003 |
| hsa-miR-374b-3p | 941 | 1962 | hsa-miR-6072 | 2983 | 4004 |
| hsa-miR-374b-5p | 942 | 1963 | hsa-miR-6073 | 2984 | 4005 |
| hsa-miR-374c-3p | 943 | 1964 | hsa-miR-6074 | 2985 | 4006 |
| hsa-miR-374c-5p | 944 | 1965 | hsa-miR-6075 | 2986 | 4007 |
| hsa-miR-375 | 945 | 1966 | hsa-miR-6076 | 2987 | 4008 |
| hsa-miR-376a-2-5p | 946 | 1967 | hsa-miR-6077 | 2988 | 4009 |
| hsa-miR-376a-3p | 947 | 1968 | hsa-miR-6078 | 2989 | 4010 |
| hsa-miR-376a-5p | 948 | 1969 | hsa-miR-6079 | 2990 | 4011 |
| hsa-miR-376b-3p | 949 | 1970 | hsa-miR-608 | 2991 | 4012 |
| hsa-miR-376b-5p | 950 | 1971 | hsa-miR-6080 | 2992 | 4013 |
| hsa-miR-376c-3p | 951 | 1972 | hsa-miR-6081 | 2993 | 4014 |
| hsa-miR-376c-5p | 952 | 1973 | hsa-miR-6082 | 2994 | 4015 |
| hsa-miR-377-3p | 953 | 1974 | hsa-miR-6083 | 2995 | 4016 |
| hsa-miR-377-5p | 954 | 1975 | hsa-miR-6084 | 2996 | 4017 |
| hsa-miR-378a-3p | 955 | 1976 | hsa-miR-6085 | 2997 | 4018 |
| hsa-miR-378a-5p | 956 | 1977 | hsa-miR-6086 | 2998 | 4019 |
| hsa-miR-378b | 957 | 1978 | hsa-miR-6087 | 2999 | 4020 |
| hsa-miR-378c | 958 | 1979 | hsa-miR-6088 | 3000 | 4021 |
| hsa-miR-378d | 959 | 1980 | hsa-miR-6089 | 3001 | 4022 |
| hsa-miR-378e | 960 | 1981 | hsa-miR-609 | 3002 | 4023 |
| hsa-miR-378f | 961 | 1982 | hsa-miR-6090 | 3003 | 4024 |
| hsa-miR-378g | 962 | 1983 | hsa-miR-610 | 3004 | 4025 |
| hsa-miR-378h | 963 | 1984 | hsa-miR-611 | 3005 | 4026 |
| hsa-miR-378i | 964 | 1985 | hsa-miR-612 | 3006 | 4027 |
| hsa-miR-378j | 965 | 1986 | hsa-miR-6124 | 3007 | 4028 |
| hsa-miR-379-3p | 966 | 1987 | hsa-miR-6125 | 3008 | 4029 |
| hsa-miR-379-5p | 967 | 1988 | hsa-miR-6126 | 3009 | 4030 |
| hsa-miR-380-3p | 968 | 1989 | hsa-miR-6127 | 3010 | 4031 |
| hsa-miR-380-5p | 969 | 1990 | hsa-miR-6128 | 3011 | 4032 |
| hsa-miR-381-3p | 970 | 1991 | hsa-miR-6129 | 3012 | 4033 |
| hsa-miR-381-5p | 971 | 1992 | hsa-miR-613 | 3013 | 4034 |
| hsa-miR-382-3p | 972 | 1993 | hsa-miR-6130 | 3014 | 4035 |
| hsa-miR-382-5p | 973 | 1994 | hsa-miR-6131 | 3015 | 4036 |
| hsa-miR-383 | 974 | 1995 | hsa-miR-6132 | 3016 | 4037 |
| hsa-miR-384 | 975 | 1996 | hsa-miR-6133 | 3017 | 4038 |
| hsa-miR-3907 | 976 | 1997 | hsa-miR-6134 | 3018 | 4039 |
| hsa-miR-3908 | 977 | 1998 | hsa-miR-614 | 3019 | 4040 |
| hsa-miR-3909 | 978 | 1999 | hsa-miR-615-3p | 3020 | 4041 |
| hsa-miR-3910 | 979 | 2000 | hsa-miR-615-5p | 3021 | 4042 |
| hsa-miR-3911 | 980 | 2001 | hsa-miR-616-3p | 3022 | 4043 |
| hsa-miR-3912 | 981 | 2002 | hsa-miR-6165 | 3023 | 4044 |
| hsa-miR-3913-3p | 982 | 2003 | hsa-miR-616-5p | 3024 | 4045 |
| hsa-miR-3913-5p | 983 | 2004 | hsa-miR-617 | 3025 | 4046 |
| hsa-miR-3914 | 984 | 2005 | hsa-miR-618 | 3026 | 4047 |
| hsa-miR-3915 | 985 | 2006 | hsa-miR-619 | 3027 | 4048 |
| hsa-miR-3916 | 986 | 2007 | hsa-miR-620 | 3028 | 4049 |
| hsa-miR-3917 | 987 | 2008 | hsa-miR-621 | 3029 | 4050 |
| hsa-miR-3918 | 988 | 2009 | hsa-miR-622 | 3030 | 4051 |
| hsa-miR-3919 | 989 | 2010 | hsa-miR-623 | 3031 | 4052 |
| hsa-miR-3920 | 990 | 2011 | hsa-miR-624-3p | 3032 | 4053 |
| hsa-miR-3921 | 991 | 2012 | hsa-miR-624-5p | 3033 | 4054 |
| hsa-miR-3922-3p | 992 | 2013 | hsa-miR-625-3p | 3034 | 4055 |
| hsa-miR-3922-5p | 993 | 2014 | hsa-miR-625-5p | 3035 | 4056 |
| hsa-miR-3923 | 994 | 2015 | hsa-miR-626 | 3036 | 4057 |
| hsa-miR-3924 | 995 | 2016 | hsa-miR-627 | 3037 | 4058 |
| hsa-miR-3925-3p | 996 | 2017 | hsa-miR-628-3p | 3038 | 4059 |
| hsa-miR-3925-5p | 997 | 2018 | hsa-miR-628-5p | 3039 | 4060 |
| hsa-miR-3926 | 998 | 2019 | hsa-miR-629-3p | 3040 | 4061 |
| hsa-miR-3927-3p | 999 | 2020 | hsa-miR-629-5p | 3041 | 4062 |
| hsa-miR-3927-5p | 1000 | 2021 | hsa-miR-630 | 3042 | 4063 |
| hsa-miR-3928 | 1001 | 2022 | hsa-miR-631 | 3043 | 4064 |
| hsa-miR-3929 | 1002 | 2023 | hsa-miR-632 | 3044 | 4065 |
| hsa-miR-3934-3p | 1003 | 2024 | hsa-miR-633 | 3045 | 4066 |
| hsa-miR-3934-5p | 1004 | 2025 | hsa-miR-634 | 3046 | 4067 |
| hsa-miR-3935 | 1005 | 2026 | hsa-miR-635 | 3047 | 4068 |
| hsa-miR-3936 | 1006 | 2027 | hsa-miR-636 | 3048 | 4069 |
| hsa-miR-3937 | 1007 | 2028 | hsa-miR-637 | 3049 | 4070 |
| hsa-miR-3938 | 1008 | 2029 | hsa-miR-638 | 3050 | 4071 |
| hsa-miR-3939 | 1009 | 2030 | hsa-miR-639 | 3051 | 4072 |
| hsa-miR-3940-3p | 1010 | 2031 | hsa-miR-640 | 3052 | 4073 |
| hsa-miR-3940-5p | 1011 | 2032 | hsa-miR-641 | 3053 | 4074 |
| hsa-miR-3941 | 1012 | 2033 | hsa-miR-642a-3p | 3054 | 4075 |
| hsa-miR-3942-3p | 1013 | 2034 | hsa-miR-642a-5p | 3055 | 4076 |
| hsa-miR-3942-5p | 1014 | 2035 | hsa-miR-642b-3p | 3056 | 4077 |
| hsa-miR-3943 | 1015 | 2036 | hsa-miR-642b-5p | 3057 | 4078 |
| hsa-miR-3944-3p | 1016 | 2037 | hsa-miR-643 | 3058 | 4079 |
| hsa-miR-3944-5p | 1017 | 2038 | hsa-miR-644a | 3059 | 4080 |
| hsa-miR-3945 | 1018 | 2039 | hsa-miR-645 | 3060 | 4081 |
| hsa-miR-3960 | 1019 | 2040 | hsa-miR-646 | 3061 | 4082 |
| hsa-miR-3972 | 1020 | 2041 | hsa-miR-647 | 3062 | 4083 |
| hsa-miR-3973 | 1021 | 2042 | hsa-miR-648 | 3063 | 4084 |
| hsa-miR-3974 | 1022 | 2043 | hsa-miR-649 | 3064 | 4085 |
| hsa-miR-3975 | 1023 | 2044 | hsa-miR-6499-3p | 3065 | 4086 |
| hsa-miR-3976 | 1024 | 2045 | hsa-miR-6499-5p | 3066 | 4087 |
| hsa-miR-3977 | 1025 | 2046 | hsa-miR-650 | 3067 | 4088 |
| hsa-miR-3978 | 1026 | 2047 | hsa-miR-6500-3p | 3068 | 4089 |
| hsa-miR-409-3p | 1027 | 2048 | hsa-miR-6500-5p | 3069 | 4090 |
| hsa-miR-409-5p | 1028 | 2049 | hsa-miR-6501-3p | 3070 | 4091 |
| hsa-miR-410 | 1029 | 2050 | hsa-miR-6501-5p | 3071 | 4092 |
| hsa-miR-411-3p | 1030 | 2051 | hsa-miR-6502-3p | 3072 | 4093 |
| hsa-miR-411-5p | 1031 | 2052 | hsa-miR-6502-5p | 3073 | 4094 |
| hsa-miR-412 | 1032 | 2053 | hsa-miR-6503-3p | 3074 | 4095 |
| hsa-miR-421 | 1033 | 2054 | hsa-miR-6503-5p | 3075 | 4096 |
| hsa-miR-422a | 1034 | 2055 | hsa-miR-6504-3p | 3076 | 4097 |
| hsa-miR-423-3p | 1035 | 2056 | hsa-miR-6504-5p | 3077 | 4098 |
| hsa-miR-423-5p | 1036 | 2057 | hsa-miR-6505-3p | 3078 | 4099 |
| hsa-miR-424-3p | 1037 | 2058 | hsa-miR-6505-5p | 3079 | 4100 |
| hsa-miR-424-5p | 1038 | 2059 | hsa-miR-6506-3p | 3080 | 4101 |
| hsa-miR-4251 | 1039 | 2060 | hsa-miR-6506-5p | 3081 | 4102 |
| hsa-miR-4252 | 1040 | 2061 | hsa-miR-6507-3p | 3082 | 4103 |
| hsa-miR-4253 | 1041 | 2062 | hsa-miR-6507-5p | 3083 | 4104 |
| hsa-miR-425-3p | 1042 | 2063 | hsa-miR-6508-3p | 3084 | 4105 |
| hsa-miR-4254 | 1043 | 2064 | hsa-miR-6508-5p | 3085 | 4106 |
| hsa-miR-4255 | 1044 | 2065 | hsa-miR-6509-3p | 3086 | 4107 |
| hsa-miR-425-5p | 1045 | 2066 | hsa-miR-6509-5p | 3087 | 4108 |
| hsa-miR-4256 | 1046 | 2067 | hsa-miR-651 | 3088 | 4109 |
| hsa-miR-4257 | 1047 | 2068 | hsa-miR-6510-3p | 3089 | 4110 |
| hsa-miR-4258 | 1048 | 2069 | hsa-miR-6510-5p | 3090 | 4111 |
| hsa-miR-4259 | 1049 | 2070 | hsa-miR-6511a-3p | 3091 | 4112 |
| hsa-miR-4260 | 1050 | 2071 | hsa-miR-6511a-5p | 3092 | 4113 |
| hsa-miR-4261 | 1051 | 2072 | hsa-miR-6511b-3p | 3093 | 4114 |
| hsa-miR-4262 | 1052 | 2073 | hsa-miR-6511b-5p | 3094 | 4115 |
| hsa-miR-4263 | 1053 | 2074 | hsa-miR-6512-3p | 3095 | 4116 |
| hsa-miR-4264 | 1054 | 2075 | hsa-miR-6512-5p | 3096 | 4117 |
| hsa-miR-4265 | 1055 | 2076 | hsa-miR-6513-3p | 3097 | 4118 |
| hsa-miR-4266 | 1056 | 2077 | hsa-miR-6513-5p | 3098 | 4119 |
| hsa-miR-4267 | 1057 | 2078 | hsa-miR-6514-3p | 3099 | 4120 |
| hsa-miR-4268 | 1058 | 2079 | hsa-miR-6514-5p | 3100 | 4121 |
| hsa-miR-4269 | 1059 | 2080 | hsa-miR-6515-3p | 3101 | 4122 |
| hsa-miR-4270 | 1060 | 2081 | hsa-miR-6515-5p | 3102 | 4123 |
| hsa-miR-4271 | 1061 | 2082 | hsa-miR-652-3p | 3103 | 4124 |
| hsa-miR-4272 | 1062 | 2083 | hsa-miR-652-5p | 3104 | 4125 |
| hsa-miR-4273 | 1063 | 2084 | hsa-miR-653 | 3105 | 4126 |
| hsa-miR-4274 | 1064 | 2085 | hsa-miR-654-3p | 3106 | 4127 |
| hsa-miR-4275 | 1065 | 2086 | hsa-miR-654-5p | 3107 | 4128 |
| hsa-miR-4276 | 1066 | 2087 | hsa-miR-655 | 3108 | 4129 |
| hsa-miR-4277 | 1067 | 2088 | hsa-miR-656 | 3109 | 4130 |
| hsa-miR-4278 | 1068 | 2089 | hsa-miR-657 | 3110 | 4131 |
| hsa-miR-4279 | 1069 | 2090 | hsa-miR-658 | 3111 | 4132 |
| hsa-miR-4280 | 1070 | 2091 | hsa-miR-659-3p | 3112 | 4133 |
| hsa-miR-4281 | 1071 | 2092 | hsa-miR-659-5p | 3113 | 4134 |
| hsa-miR-4282 | 1072 | 2093 | hsa-miR-660-3p | 3114 | 4135 |
| hsa-miR-4283 | 1073 | 2094 | hsa-miR-660-5p | 3115 | 4136 |
| hsa-miR-4284 | 1074 | 2095 | hsa-miR-661 | 3116 | 4137 |
| hsa-miR-4285 | 1075 | 2096 | hsa-miR-662 | 3117 | 4138 |
| hsa-miR-4286 | 1076 | 2097 | hsa-miR-663a | 3118 | 4139 |
| hsa-miR-4287 | 1077 | 2098 | hsa-miR-663b | 3119 | 4140 |
| hsa-miR-4288 | 1078 | 2099 | hsa-miR-664a-3p | 3120 | 4141 |
| hsa-miR-4289 | 1079 | 2100 | hsa-miR-664a-5p | 3121 | 4142 |
| hsa-miR-429 | 1080 | 2101 | hsa-miR-664b-3p | 3122 | 4143 |
| hsa-miR-4290 | 1081 | 2102 | hsa-miR-664b-5p | 3123 | 4144 |
| hsa-miR-4291 | 1082 | 2103 | hsa-miR-665 | 3124 | 4145 |
| hsa-miR-4292 | 1083 | 2104 | hsa-miR-668 | 3125 | 4146 |
| hsa-miR-4293 | 1084 | 2105 | hsa-miR-670 | 3126 | 4147 |
| hsa-miR-4294 | 1085 | 2106 | hsa-miR-671-3p | 3127 | 4148 |
| hsa-miR-4295 | 1086 | 2107 | hsa-miR-6715a-3p | 3128 | 4149 |
| hsa-miR-4296 | 1087 | 2108 | hsa-miR-6715b-3p | 3129 | 4150 |
| hsa-miR-4297 | 1088 | 2109 | hsa-miR-6715b-5p | 3130 | 4151 |
| hsa-miR-4298 | 1089 | 2110 | hsa-miR-671-5p | 3131 | 4152 |
| hsa-miR-4299 | 1090 | 2111 | hsa-miR-6716-3p | 3132 | 4153 |
| hsa-miR-4300 | 1091 | 2112 | hsa-miR-6716-5p | 3133 | 4154 |
| hsa-miR-4301 | 1092 | 2113 | hsa-miR-6717-5p | 3134 | 4155 |
| hsa-miR-4302 | 1093 | 2114 | hsa-miR-6718-5p | 3135 | 4156 |
| hsa-miR-4303 | 1094 | 2115 | hsa-miR-6719-3p | 3136 | 4157 |
| hsa-miR-4304 | 1095 | 2116 | hsa-miR-6720-3p | 3137 | 4158 |
| hsa-miR-4305 | 1096 | 2117 | hsa-miR-6721-5p | 3138 | 4159 |
| hsa-miR-4306 | 1097 | 2118 | hsa-miR-6722-3p | 3139 | 4160 |
| hsa-miR-4307 | 1098 | 2119 | hsa-miR-6722-5p | 3140 | 4161 |
| hsa-miR-4308 | 1099 | 2120 | hsa-miR-6723-5p | 3141 | 4162 |
| hsa-miR-4309 | 1100 | 2121 | hsa-miR-6724-5p | 3142 | 4163 |
| hsa-miR-4310 | 1101 | 2122 | hsa-miR-675-3p | 3143 | 4164 |
| hsa-miR-4311 | 1102 | 2123 | hsa-miR-675-5p | 3144 | 4165 |
| hsa-miR-4312 | 1103 | 2124 | hsa-miR-676-3p | 3145 | 4166 |
| hsa-miR-4313 | 1104 | 2125 | hsa-miR-676-5p | 3146 | 4167 |
| hsa-miR-431-3p | 1105 | 2126 | hsa-miR-708-3p | 3147 | 4168 |
| hsa-miR-4314 | 1106 | 2127 | hsa-miR-708-5p | 3148 | 4169 |
| hsa-miR-4315 | 1107 | 2128 | hsa-miR-711 | 3149 | 4170 |
| hsa-miR-431-5p | 1108 | 2129 | hsa-miR-7-1-3p | 3150 | 4171 |
| hsa-miR-4316 | 1109 | 2130 | hsa-miR-718 | 3151 | 4172 |
| hsa-miR-4317 | 1110 | 2131 | hsa-miR-7-2-3p | 3152 | 4173 |
| hsa-miR-4318 | 1111 | 2132 | hsa-miR-744-3p | 3153 | 4174 |
| hsa-miR-4319 | 1112 | 2133 | hsa-miR-744-5p | 3154 | 4175 |
| hsa-miR-4320 | 1113 | 2134 | hsa-miR-758-3p | 3155 | 4176 |
| hsa-miR-4321 | 1114 | 2135 | hsa-miR-758-5p | 3156 | 4177 |
| hsa-miR-4322 | 1115 | 2136 | hsa-miR-759 | 3157 | 4178 |
| hsa-miR-4323 | 1116 | 2137 | hsa-miR-7-5p | 3158 | 4179 |
| hsa-miR-432-3p | 1117 | 2138 | hsa-miR-760 | 3159 | 4180 |
| hsa-miR-4324 | 1118 | 2139 | hsa-miR-761 | 3160 | 4181 |
| hsa-miR-4325 | 1119 | 2140 | hsa-miR-762 | 3161 | 4182 |
| hsa-miR-432-5p | 1120 | 2141 | hsa-miR-764 | 3162 | 4183 |
| hsa-miR-4326 | 1121 | 2142 | hsa-miR-765 | 3163 | 4184 |
| hsa-miR-4327 | 1122 | 2143 | hsa-miR-766-3p | 3164 | 4185 |
| hsa-miR-4328 | 1123 | 2144 | hsa-miR-766-5p | 3165 | 4186 |
| hsa-miR-4329 | 1124 | 2145 | hsa-miR-767-3p | 3166 | 4187 |
| hsa-miR-433 | 1125 | 2146 | hsa-miR-767-5p | 3167 | 4188 |
| hsa-miR-4330 | 1126 | 2147 | hsa-miR-769-3p | 3168 | 4189 |
| hsa-miR-4417 | 1127 | 2148 | hsa-miR-769-5p | 3169 | 4190 |
| hsa-miR-4418 | 1128 | 2149 | hsa-miR-770-5p | 3170 | 4191 |
| hsa-miR-4419a | 1129 | 2150 | hsa-miR-802 | 3171 | 4192 |
| hsa-miR-4419b | 1130 | 2151 | hsa-miR-873-3p | 3172 | 4193 |
| hsa-miR-4420 | 1131 | 2152 | hsa-miR-873-5p | 3173 | 4194 |
| hsa-miR-4421 | 1132 | 2153 | hsa-miR-874 | 3174 | 4195 |
| hsa-miR-4422 | 1133 | 2154 | hsa-miR-875-3p | 3175 | 4196 |
| hsa-miR-4423-3p | 1134 | 2155 | hsa-miR-875-5p | 3176 | 4197 |
| hsa-miR-4423-5p | 1135 | 2156 | hsa-miR-876-3p | 3177 | 4198 |
| hsa-miR-4424 | 1136 | 2157 | hsa-miR-876-5p | 3178 | 4199 |
| hsa-miR-4425 | 1137 | 2158 | hsa-miR-877-3p | 3179 | 4200 |
| hsa-miR-4426 | 1138 | 2159 | hsa-miR-877-5p | 3180 | 4201 |
| hsa-miR-4427 | 1139 | 2160 | hsa-miR-885-3p | 3181 | 4202 |
| hsa-miR-4428 | 1140 | 2161 | hsa-miR-885-5p | 3182 | 4203 |
| hsa-miR-4429 | 1141 | 2162 | hsa-miR-887 | 3183 | 4204 |
| hsa-miR-4430 | 1142 | 2163 | hsa-miR-888-3p | 3184 | 4205 |
| hsa-miR-4431 | 1143 | 2164 | hsa-miR-888-5p | 3185 | 4206 |
| hsa-miR-4432 | 1144 | 2165 | hsa-miR-889 | 3186 | 4207 |
| hsa-miR-4433-3p | 1145 | 2166 | hsa-miR-890 | 3187 | 4208 |
| hsa-miR-4433-5p | 1146 | 2167 | hsa-miR-891a | 3188 | 4209 |
| hsa-miR-4434 | 1147 | 2168 | hsa-miR-891b | 3189 | 4210 |
| hsa-miR-4435 | 1148 | 2169 | hsa-miR-892a | 3190 | 4211 |
| hsa-miR-4436a | 1149 | 2170 | hsa-miR-892b | 3191 | 4212 |
| hsa-miR-4436b-3p | 1150 | 2171 | hsa-miR-892c-3p | 3192 | 4213 |
| hsa-miR-4436b-5p | 1151 | 2172 | hsa-miR-892c-5p | 3193 | 4214 |
| hsa-miR-4437 | 1152 | 2173 | hsa-miR-920 | 3194 | 4215 |
| hsa-miR-4438 | 1153 | 2174 | hsa-miR-921 | 3195 | 4216 |
| hsa-miR-4439 | 1154 | 2175 | hsa-miR-922 | 3196 | 4217 |
| hsa-miR-4440 | 1155 | 2176 | hsa-miR-924 | 3197 | 4218 |
| hsa-miR-4441 | 1156 | 2177 | hsa-miR-92a-1-5p | 3198 | 4219 |
| hsa-miR-4442 | 1157 | 2178 | hsa-miR-92a-2-5p | 3199 | 4220 |
| hsa-miR-4443 | 1158 | 2179 | hsa-miR-92a-3p | 3200 | 4221 |
| hsa-miR-4444 | 1159 | 2180 | hsa-miR-92b-3p | 3201 | 4222 |
| hsa-miR-4445-3p | 1160 | 2181 | hsa-miR-92b-5p | 3202 | 4223 |
| hsa-miR-4445-5p | 1161 | 2182 | hsa-miR-933 | 3203 | 4224 |
| hsa-miR-4446-3p | 1162 | 2183 | hsa-miR-93-3p | 3204 | 4225 |
| hsa-miR-4446-5p | 1163 | 2184 | hsa-miR-934 | 3205 | 4226 |
| hsa-miR-4447 | 1164 | 2185 | hsa-miR-935 | 3206 | 4227 |
| hsa-miR-4448 | 1165 | 2186 | hsa-miR-93-5p | 3207 | 4228 |
| hsa-miR-4449 | 1166 | 2187 | hsa-miR-936 | 3208 | 4229 |
| hsa-miR-4450 | 1167 | 2188 | hsa-miR-937-3p | 3209 | 4230 |
| hsa-miR-4451 | 1168 | 2189 | hsa-miR-937-5p | 3210 | 4231 |
| hsa-miR-4452 | 1169 | 2190 | hsa-miR-938 | 3211 | 4232 |
| hsa-miR-4453 | 1170 | 2191 | hsa-miR-939-3p | 3212 | 4233 |
| hsa-miR-4454 | 1171 | 2192 | hsa-miR-939-5p | 3213 | 4234 |
| hsa-miR-4455 | 1172 | 2193 | hsa-miR-9-3p | 3214 | 4235 |
| hsa-miR-4456 | 1173 | 2194 | hsa-miR-940 | 3215 | 4236 |
| hsa-miR-4457 | 1174 | 2195 | hsa-miR-941 | 3216 | 4237 |
| hsa-miR-4458 | 1175 | 2196 | hsa-miR-942 | 3217 | 4238 |
| hsa-miR-4459 | 1176 | 2197 | hsa-miR-943 | 3218 | 4239 |
| hsa-miR-4460 | 1177 | 2198 | hsa-miR-944 | 3219 | 4240 |
| hsa-miR-4461 | 1178 | 2199 | hsa-miR-95 | 3220 | 4241 |
| hsa-miR-4462 | 1179 | 2200 | hsa-miR-9-5p | 3221 | 4242 |
| hsa-miR-4463 | 1180 | 2201 | hsa-miR-96-3p | 3222 | 4243 |
| hsa-miR-4464 | 1181 | 2202 | hsa-miR-96-5p | 3223 | 4244 |
| hsa-miR-4465 | 1182 | 2203 | hsa-miR-98-3p | 3224 | 4245 |
| hsa-miR-4466 | 1183 | 2204 | hsa-miR-98-5p | 3225 | 4246 |
| hsa-miR-4467 | 1184 | 2205 | hsa-miR-99a-3p | 3226 | 4247 |
| hsa-miR-4468 | 1185 | 2206 | hsa-miR-99a-5p | 3227 | 4248 |
| hsa-miR-4469 | 1186 | 2207 | hsa-miR-99b-3p | 3228 | 4249 |
| hsa-miR-4470 | 1187 | 2208 | hsa-miR-99b-5p | 3229 | 4250 |

### III. Modifications

[0229] Herein, in a nucleotide, nucleoside polynucleotide (such as the nucleic acids of the invention, e.g., modified RNA, modified nucleic acid molecule, modified RNAs, nucleic acid and modified nucleic acids), the terms “modification” or, as appropriate, “modified” refer to modification with respect to A, G, U or C ribonucleotides. Generally, herein, these terms are not intended to refer to the ribonucleotide modifications in naturally occurring 5′-terminal mRNA cap moieties. In a polypeptide, the term “modification” refers to a modification as compared to the canonical set of 20 amino acids.

[0230] The modifications may be various distinct modifications. In some embodiments, where the nucleic acids or modified RNA, the coding region, the flanking regions and/or the terminal regions may contain one, two, or more (optionally different) nucleoside or nucleotide modifications. In some embodiments, a modified nucleic acids or modified RNA introduced to a cell may exhibit reduced degradation in the cell, as compared to an unmodified nucleic acid or modified RNA.

[0231] The polynucleotide, primary construct, nucleic acids or modified RNA can include any useful modification, such as to the sugar, the nucleobase, or the internucleoside linkage (e.g. to a linking phosphate/to a phosphodiester linkage/to the phosphodiester backbone). One or more atoms of a pyrimidine nucleobase may be replaced or substituted with optionally substituted amino, optionally substituted thiol, optionally substituted alkyl (e.g., methyl or ethyl), or halo (e.g., chloro or fluoro). In certain embodiments, modifications (e.g., one or more modifications) are present in each of the sugar and the internucleoside linkage. Modifications according to the present invention may be modifications of ribonucleic acids (RNAs) to deoxyribonucleic acids (DNAs), e.g., the substitution of the 2′OH of the ribofuranysyl ring to 2′H, threose nucleic acids (TNAs), glycol nucleic acids (GNAs), peptide nucleic acids (PNAs), locked nucleic acids (LNAs) or hybrids thereof). Additional modifications are described herein.

[0232] As described herein, the polynucleotides, primary construct, nucleic acids or modified RNA of the invention do not substantially induce an innate immune response of a cell into which the polynucleotides, primary constructs, nucleic acids or modified RNA (e.g., mRNA) is introduced. Features of an induced innate immune response include 1) increased expression of pro-inflammatory cytokines, 2) activation of intracellular PRRs (RIG-I, MDA5, etc, and/or 3) termination or reduction in protein translation.

[0233] In certain embodiments, it may desirable for a modified nucleic acid molecule introduced into the cell to be degraded intracellulary. For example, degradation of a modified nucleic acid molecule may be preferable if precise timing of protein production is desired. Thus, in some embodiments, the invention provides a modified nucleic acid molecule containing a degradation domain, which is capable of being acted on in a directed manner within a cell. In another aspect, the present disclosure provides polynucleotides, primary constructs, nucleic acids or modified RNA comprising a nucleoside or nucleotide that can disrupt the binding of a major groove interacting, e.g. binding, partner with the polynucleotides, primary constructs, nucleic acids or modified RNA (e.g., where the modified nucleotide has decreased binding affinity to major groove interacting partner, as compared to an unmodified nucleotide).

[0234] The polynucleotides, primary constructs, nucleic acids or modified RNA can optionally include other agents (e.g., RNAi-inducing agents, RNAi agents, siRNAs, shRNAs, miRNAs, antisense RNAs, ribozymes, catalytic DNA, tRNA, RNAs that induce triple helix formation, aptamers, vectors, etc.). In some embodiments, the polynucleotides, primary constructs, nucleic acids or modified RNA may include one or more messenger RNAs (mRNAs) having one or more modified nucleoside or nucleotides (i.e., modified mRNA molecules). Details for these nucleic acids or modified RNA follow.

Modified mRNA Molecules

[0235] The polynucleotides, primary constructs, nucleic acids or modified RNA of the invention includes a first region of linked nucleosides encoding a polypeptide of interest, a first flanking region located at the 5′ terminus of the first region, and a second flanking region located at the 3′ terminus of the first region. The first region of linked nucleosides may be a translatable region.

[0236] In some embodiments, the polynucleotides, primary constructs, nucleic acids or modified RNA (e.g., the first region, first flanking region, or second flanking region) includes n number of linked nucleosides having Formula (Ia) or Formula (Ia-1):

[chemical structure]

or a pharmaceutically acceptable salt or stereoisomer thereof, wherein U is O, S, N(R^{U})ₙᵤ, or C(R^{U})ₙᵤ, wherein nu is an integer from 0 to 2 and each R^{U} is, independently, H, halo, or optionally substituted alkyl;

[0237] - - - is a single bond or absent;

[0238] each of R^{1′}, R^{2′}, R^{1″}, R^{2″}, R¹, R², R³, R⁴, and R⁵, if present, is independently, H, halo, hydroxy, thiol, optionally substituted alkyl, optionally substituted alkoxy, optionally substituted alkenyloxy, optionally substituted alkynyloxy, optionally substituted aminoalkoxy, optionally substituted alkoxyalkoxy, optionally substituted hydroxyalkoxy, optionally substituted amino, azido, optionally substituted aryl, optionally substituted aminoalkyl, optionally substituted aminoalkenyl, optionally substituted aminoalkynyl, or absent; wherein the combination of R³ with one or more of R^{1′}, R^{1″}, R^{2′}, R^{2″}, or R⁵ (e.g., the combination of R^{1′} and R³, the combination of R^{1″} and R³, the combination of R^{2′} and R³, the combination of R^{2″} and R³, or the combination of R⁵ and R³) can join together to form optionally substituted alkylene or optionally substituted heteroalkylene and, taken together with the carbons to which they are attached, provide an optionally substituted heterocyclyl (e.g., a bicyclic, tricyclic, or tetracyclic heterocyclyl); wherein the combination of R⁵ with one or more of R^{1′}, R^{1″}, R^{2′}, or R^{2″} (e.g., the combination of R^{1′} and R⁵, the combination of R^{1″} and R⁵, the combination of R^{2′} and R⁵, or the combination of R^{2″} and R⁵) can join together to form optionally substituted alkylene or optionally substituted heteroalkylene and, taken together with the carbons to which they are attached, provide an optionally substituted heterocyclyl (e.g., a bicyclic, tricyclic, or tetracyclic heterocyclyl); and wherein the combination of R⁴ and one or more of R^{1′}, R^{1″}, R^{2′}, R^{2″}, R³, or R⁵ can join together to form optionally substituted alkylene or optionally substituted heteroalkylene and, taken together with the carbons to which they are attached, provide an optionally substituted heterocyclyl (e.g., a bicyclic, tricyclic, or tetracyclic heterocyclyl);

[0239] each of m′ and m″ is, independently, an integer from 0 to 3 (e.g., from 0 to 2, from 0 to 1, from 1 to 3, or from 1 to 2);

[0240] each of Y¹, Y², and Y³, is, independently, O, S, Se, —NR^{N1}—, optionally substituted alkylene, or optionally substituted heteroalkylene, wherein R^{N1} is H, optionally substituted alkyl, optionally substituted alkenyl, optionally substituted alkynyl, optionally substituted aryl, or absent;

[0241] each Y⁴ is, independently, H, hydroxy, thiol, boranyl, optionally substituted alkyl, optionally substituted alkenyl, optionally substituted alkynyl, optionally substituted alkoxy, optionally substituted alkenyloxy, optionally substituted alkynyloxy, optionally substituted thioalkoxy, optionally substituted alkoxyalkoxy, or optionally substituted amino;

[0242] each Y⁵ is, independently, O, S, Se, optionally substituted alkylene (e.g., methylene), or optionally substituted heteroalkylene;

[0243] n is an integer from 1 to 100,000; and

[0244] B is a nucleobase (e.g., a purine, a pyrimidine, or derivatives thereof), wherein the combination of B and R^{1″}, the combination of B and R^{2′}, the combination of B and R^{1″}, or the combination of B and R^{2″} can, taken together with the carbons to which they are attached, optionally form a bicyclic group (e.g., a bicyclic heterocyclyl) or wherein the combination of B, R^{1″}, and R³ or the combination of B, R^{2″}, and R³ can optionally form a tricyclic or tetracyclic group (e.g., a tricyclic or tetracyclic heterocyclyl, such as in Formula (IIo)-(IIp) herein).

[0245] In some embodiments, the polynucleotides, primary constructs, nucleic acids or modified RNA includes a modified ribose. In some embodiments, the polynucleotides, primary constructs, nucleic acids or modified RNA (e.g., the first region, the first flanking region, or the second flanking region) includes n number of linked nucleosides having Formula (Ia-2)-(Ia-5) or a pharmaceutically acceptable salt or stereoisomer thereof.

[chemical structure]

[0246] In some embodiments, the polynucleotides, primary constructs, nucleic acids or modified RNA (e.g., the first region, the first flanking region, or the second flanking region) includes n number of linked nucleosides having Formula (Ib) or Formula (Ib-1):

[chemical structure]

[0247] or a pharmaceutically acceptable salt or stereoisomer thereof, wherein

[0248] U is O, S, N(R^{U})ₙᵤ, or C(R^{U})ₙᵤ, wherein nu is an integer from 0 to 2 and each R^{U} is, independently, H, halo, or optionally substituted alkyl;

[0249] - - - is a single bond or absent;

[0250] each of R¹, R^{3′}, R^{3″}, and R⁴ is, independently, H, halo, hydroxy, optionally substituted alkyl, optionally substituted alkoxy, optionally substituted alkenyloxy, optionally substituted alkynyloxy, optionally substituted aminoalkoxy, optionally substituted alkoxyalkoxy, optionally substituted hydroxyalkoxy, optionally substituted amino, azido, optionally substituted aryl, optionally substituted aminoalkyl, optionally substituted aminoalkenyl, optionally substituted aminoalkynyl, or absent; and wherein the combination of R¹ and R^{3′} or the combination of R¹ and R^{3″} can be taken together to form optionally substituted alkylene or optionally substituted heteroalkylene (e.g., to produce a locked nucleic acid);

[0251] each R⁵ is, independently, H, halo, hydroxy, optionally substituted alkyl, optionally substituted alkoxy, optionally substituted alkenyloxy, optionally substituted alkynyloxy, optionally substituted aminoalkoxy, optionally substituted alkoxyalkoxy, or absent;

[0252] each of Y¹, Y², and Y³ is, independently, O, S, Se, NR^{N1}—, optionally substituted alkylene, or optionally substituted heteroalkylene, wherein R^{N1} is H, optionally substituted alkyl, optionally substituted alkenyl, optionally substituted alkynyl, or optionally substituted aryl;

[0253] each Y⁴ is, independently, H, hydroxy, thiol, boranyl, optionally substituted alkyl, optionally substituted alkenyl, optionally substituted alkynyl, optionally substituted alkoxy, optionally substituted alkenyloxy, optionally substituted alkynyloxy, optionally substituted alkoxyalkoxy, or optionally substituted amino;

[0254] n is an integer from 1 to 100,000; and

[0255] B is a nucleobase.

[0256] In some embodiments, the polynucleotides, primary constructs, nucleic acids or modified RNA (e.g., the first region, first flanking region, or second flanking region) includes n number of linked nucleosides having Formula (Ic):

[chemical structure]

or a pharmaceutically acceptable salt or stereoisomer thereof, wherein

[0257] U is O, S, N(R^{U})ₙᵤ, or C(R^{U})ₙᵤ, wherein nu is an integer from 0 to 2 and each R^{U} is, independently, H, halo, or optionally substituted alkyl;

[0258] - - - is a single bond or absent;

[0259] each of B¹, B², and B³ is, independently, a nucleobase (e.g., a purine, a pyrimidine, or derivatives thereof, as described herein), H, halo, hydroxy, thiol, optionally substituted alkyl, optionally substituted alkoxy, optionally substituted alkenyloxy, optionally substituted alkynyloxy, optionally substituted aminoalkoxy, optionally substituted alkoxyalkoxy, optionally substituted hydroxyalkoxy, optionally substituted amino, azido, optionally substituted aryl, optionally substituted aminoalkyl, optionally substituted aminoalkenyl, or optionally substituted aminoalkynyl, wherein one and only one of B¹, B², and B³ is a nucleobase;

[0260] each of R^{b1}, R^{b2}, R^{b3}, R³, and R⁵ is, independently, H, halo, hydroxy, thiol, optionally substituted alkyl, optionally substituted alkoxy, optionally substituted alkenyloxy, optionally substituted alkynyloxy, optionally substituted aminoalkoxy, optionally substituted alkoxyalkoxy, optionally substituted hydroxyalkoxy, optionally substituted amino, azido, optionally substituted aryl, optionally substituted aminoalkyl, optionally substituted aminoalkenyl, or optionally substituted aminoalkynyl;

[0261] each of Y¹, Y², and Y³, is, independently, O, S, Se, —NR^{N1}—, optionally substituted alkylene, or optionally substituted heteroalkylene, wherein R^{N1} is H, optionally substituted alkyl, optionally substituted alkenyl, optionally substituted alkynyl, or optionally substituted aryl;

[0262] each Y⁴ is, independently, H, hydroxy, thiol, boranyl, optionally substituted alkyl, optionally substituted alkenyl, optionally substituted alkynyl, optionally substituted alkoxy, optionally substituted alkenyloxy, optionally substituted alkynyloxy, optionally substituted thioalkoxy, optionally substituted alkoxyalkoxy, or optionally substituted amino;

[0263] each Y⁵ is, independently, O, S, Se, optionally substituted alkylene (e.g., methylene), or optionally substituted heteroalkylene;

[0264] n is an integer from 1 to 100,000; and

[0265] wherein the ring including U can include one or more double bonds.

[0266] In particular embodiments, the ring including U does not have a double bond between U-CB³R^{b3} or between CB³R^{b3}—C^{B2}R^{b2}.

[0267] In some embodiments, the polynucleotides, primary constructs, nucleic acids or modified RNA (e.g., the first region, first flanking region, or second flanking region) includes n number of linked nucleosides having Formula (Id):

[chemical structure]

or a pharmaceutically acceptable salt or stereoisomer thereof, wherein U is O, S, N(R^{U})ₙᵤ, or C(R^{U})ₙᵤ, wherein nu is an integer from 0 to 2 and each R^{U} is, independently, H, halo, or optionally substituted alkyl;

[0268] each R³ is, independently, H, halo, hydroxy, thiol, optionally substituted alkyl, optionally substituted alkoxy, optionally substituted alkenyloxy, optionally substituted alkynyloxy, optionally substituted aminoalkoxy, optionally substituted alkoxyalkoxy, optionally substituted hydroxyalkoxy, optionally substituted amino, azido, optionally substituted aryl, optionally substituted aminoalkyl, optionally substituted aminoalkenyl, or optionally substituted aminoalkynyl;

[0269] each of Y¹, Y², and Y³, is, independently, O, S, Se, —NR^{N1}—, optionally substituted alkylene, or optionally substituted heteroalkylene, wherein R^{N1} is H, optionally substituted alkyl, optionally substituted alkenyl, optionally substituted alkynyl, or optionally substituted aryl;

[0270] each Y⁴ is, independently, H, hydroxy, thiol, boranyl, optionally substituted alkyl, optionally substituted alkenyl, optionally substituted alkynyl, optionally substituted alkoxy, optionally substituted alkenyloxy, optionally substituted alkynyloxy, optionally substituted thioalkoxy, optionally substituted alkoxyalkoxy, or optionally substituted amino;

[0271] each Y⁵ is, independently, O, S, optionally substituted alkylene (e.g., methylene), or optionally substituted heteroalkylene;

[0272] n is an integer from 1 to 100,000; and

[0273] B is a nucleobase (e.g., a purine, a pyrimidine, or derivatives thereof).

[0274] In some embodiments, the polynucleotide (e.g., the first region, first flanking region, or second flanking region) includes n number of linked nucleosides having Formula (Ie):

[chemical structure]

or a pharmaceutically acceptable salt or stereoisomer thereof,

[0275] wherein each of U′ and U″ is, independently, O, S, N(R^{U})ₙᵤ, or C(R^{U})ₙᵤ, wherein nu is an integer from 0 to 2 and each R^{U} is, independently, H, halo, or optionally substituted alkyl;

[0276] each R⁶ is, independently, H, halo, hydroxy, thiol, optionally substituted alkyl, optionally substituted alkoxy, optionally substituted alkenyloxy, optionally substituted alkynyloxy, optionally substituted aminoalkoxy, optionally substituted alkoxyalkoxy, optionally substituted hydroxyalkoxy, optionally substituted amino, azido, optionally substituted aryl, optionally substituted aminoalkyl, optionally substituted aminoalkenyl, or optionally substituted aminoalkynyl;

[0277] each Y^{5′} is, independently, O, S, optionally substituted alkylene (e.g., methylene or ethylene), or optionally substituted heteroalkylene;

[0278] n is an integer from 1 to 100,000; and

[0279] B is a nucleobase (e.g., a purine, a pyrimidine, or derivatives thereof).

[0280] In some embodiments, the polynucleotides, primary constructs, nucleic acids or modified RNA (e.g., the first region, first flanking region, or second flanking region) includes n number of linked nucleosides having Formula (If) or (If-1):

[chemical structure]

or a pharmaceutically acceptable salt or stereoisomer thereof,

[0281] wherein each of U′ and U″ is, independently, O, S, N, N(R^{U})ₙᵤ, or C(R^{U})ₙᵤ, wherein nu is an integer from 0 to 2 and each R^{U} is, independently, H, halo, or optionally substituted alkyl (e.g., U′ is O and U″ is N);

[0282] - - - is a single bond or absent;

[0283] each of R^{1′}, R^{2′}, R^{1″}, R^{2″}, R³, and R⁴ is, independently, H, halo, hydroxy, thiol, optionally substituted alkyl, optionally substituted alkoxy, optionally substituted alkenyloxy, optionally substituted alkynyloxy, optionally substituted aminoalkoxy, optionally substituted alkoxyalkoxy, optionally substituted hydroxyalkoxy, optionally substituted amino, azido, optionally substituted aryl, optionally substituted aminoalkyl, optionally substituted aminoalkenyl, optionally substituted aminoalkynyl, or absent; and wherein the combination of R^{1′} and R³, the combination of R^{1″} and R³, the combination of R^{2′} and R³, or the combination of R^{2″} and R³ can be taken together to form optionally substituted alkylene or optionally substituted heteroalkylene (e.g., to produce a locked nucleic acid); each of m′ and m″ is, independently, an integer from 0 to 3 (e.g., from 0 to 2, from 0 to 1, from 1 to 3, or from 1 to 2);

[0284] each of Y¹, Y², and Y³, is, independently, O, S, Se, —NR^{N1}—, optionally substituted alkylene, or optionally substituted heteroalkylene, wherein R^{N1} is H, optionally substituted alkyl, optionally substituted alkenyl, optionally substituted alkynyl, optionally substituted aryl, or absent;

[0285] each Y⁴ is, independently, H, hydroxy, thiol, boranyl, optionally substituted alkyl, optionally substituted alkenyl, optionally substituted alkynyl, optionally substituted alkoxy, optionally substituted alkenyloxy, optionally substituted alkynyloxy, optionally substituted thioalkoxy, optionally substituted alkoxyalkoxy, or optionally substituted amino;

[0286] each Y⁵ is, independently, O, S, Se, optionally substituted alkylene (e.g., methylene), or optionally substituted heteroalkylene;

[0287] n is an integer from 1 to 100,000; and

[0288] B is a nucleobase (e.g., a purine, a pyrimidine, or derivatives thereof).

[0289] In some embodiments of the polynucleotides, primary constructs, nucleic acids or modified RNA (e.g., Formulas (Ia)-(Ia-5), (Ib)-(If-1), (IIa)-(IIp), (IIb-1), (IIb-2), (IIc-1)-(IIc-2), (IIn-1), (IIn-2), (IVa)-(IVl), and (IXa)-(IXr)), the ring including U has one or two double bonds.

[0290] In some embodiments of the polynucleotides, primary constructs, nucleic acids or modified RNA (e.g., Formulas (Ia)-Ia-5), (Ib)-(If-1), (IIa)-(IIp), (IIb-1), (IIb-2), (IIc-1)-(IIc-2), (IIn-1), (IIn-2), (IVa)-(IVl), and (IXa)-(IXr)), each of R¹, R^{1′}, and R^{1″}, if present, is H. In further embodiments, each of R², R^{2′}, and R^{2″}, if present, is, independently, H, halo (e.g., fluoro), hydroxy, optionally substituted alkoxy (e.g., methoxy or ethoxy), or optionally substituted alkoxyalkoxy. In particular embodiments, alkoxyalkoxy is —(CH₂)ₛ₂(OCH₂CH₂)ₛ₁(CH₂)ₛ₃OR′, wherein s1 is an integer from 1 to 10 (e.g., from 1 to 6 or from 1 to 4), each of s2 and s3, independently, is an integer from 0 to 10 (e.g., from 0 to 4, from 0 to 6, from 1 to 4, from 1 to 6, or from 1 to 10), and R′ is H or C₁₋₂₀ alkyl). In some embodiments, s2 is 0, s1 is 1 or 2, s3 is 0 or 1, and R′ is C₁₋₆ alkyl.

[0291] In some embodiments of the polynucleotides, primary constructs, nucleic acids or modified RNA (e.g., Formulas (Ia)-(Ia-5), (Ib)-(If), (IIa)-(IIp), (IIb-1), (IIb-2), (IIc-1)-(IIc-2), (IIn-1), (IIn-2), (IVa)-(IVl), and (IXa)-(IXr)), each of R², R^{2′}, and R^{2″}, if present, is H. In further embodiments, each of R¹, R^{1′}, and R^{1″}, if present, is, independently, H, halo (e.g., fluoro), hydroxy, optionally substituted alkoxy (e.g., methoxy or ethoxy), or optionally substituted alkoxyalkoxy. In particular embodiments, alkoxyalkoxy is —(CH₂)ₛ₂(OCH₂CH₂)ₛ₁(CH₂)ₛ₃OR′, wherein s1 is an integer from 1 to 10 (e.g., from 1 to 6 or from 1 to 4), each of s2 and s3, independently, is an integer from 0 to 10 (e.g., from 0 to 4, from 0 to 6, from 1 to 4, from 1 to 6, or from 1 to 10), and R′ is H or C₁₋₂₀ alkyl). In some embodiments, s2 is 0, s1 is 1 or 2, s3 is 0 or 1, and R′ is C₁₋₆ alkyl.

[0292] In some embodiments of the polynucleotides, primary constructs, nucleic acids or modified RNA (e.g., Formulas (Ia)-(Ia-5), (Ib)-(If-1), (IIa)-(IIp), (IIb-1), (IIb-2), (IIc-1)-(IIc-2), (IIn-1), (IIn-2), (IVa)-(IVl), and (IXa)-(IXr)), each of R³, R⁴, and R⁵ is, independently, H, halo (e.g., fluoro), hydroxy, optionally substituted alkyl, optionally substituted alkoxy (e.g., methoxy or ethoxy), or optionally substituted alkoxyalkoxy. In particular embodiments, R³ is H, R⁴ is H, R⁵ is H, or R³, R⁴, and R⁵ are all H. In particular embodiments, R³ is C₁₋₆ alkyl, R⁴ is C₁₋₆ alkyl, R⁵ is C₁₋₆ alkyl, or R³, R⁴, and R⁵ are all C₁₋₆ alkyl. In particular embodiments, R³ and R⁴ are both H, and R⁵ is C₁₋₆ alkyl.

[0293] In some embodiments of the polynucleotides, primary constructs, nucleic acids or modified RNA (e.g., Formulas (Ia)-(Ia-5), (Ib)-(If-1), (IIa)-(IIp), (IIb-1), (IIb-2), (IIc-1)-(IIc-2), (IIn-1), (IIn-2), (IVa)-(IVl), and (IXa)-(IXr)), R³ and R⁵ join together to form optionally substituted alkylene or optionally substituted heteroalkylene and, taken together with the carbons to which they are attached, provide an optionally substituted heterocyclyl (e.g., a bicyclic, tricyclic, or tetracyclic heterocyclyl, such as trans-3′,4′ analogs, wherein R³ and R⁵ join together to form heteroalkylene (e.g., —(CH₂)_{b1}O(CH₂)_{b2}O(CH₂)_{b3}—, wherein each of b1, b2, and b3 are, independently, an integer from 0 to 3).

[0294] In some embodiments of the polynucleotides, primary constructs, nucleic acids or modified RNA (e.g., Formulas (Ia)-(Ia-5), (Ib)-(If-1), (IIa)-(IIp), (IIb-1), (IIb-2), (IIc-1)-(IIc-2), (IIn-1), (IIn-2), (IVa)-(IVl), and (IXa)-(IXr)), R³ and one or more of R^{1′}, R^{1″}, R^{2′}, R^{2″}, or R⁵ join together to form optionally substituted alkylene or optionally substituted heteroalkylene and, taken together with the carbons to which they are attached, provide an optionally substituted heterocyclyl (e.g., a bicyclic, tricyclic, or tetracyclic heterocyclyl, R³ and one or more of R^{1′}, R^{1″}, R^{2′}, R^{2″}, or R⁵ join together to form heteroalkylene (e.g., —(CH₂)_{b1}O(CH₂)_{b2}O(CH₂)_{b3}—, wherein each of b1, b2, and b3 are, independently, an integer from 0 to 3).

[0295] In some embodiments of the polynucleotides, primary constructs, nucleic acids or modified RNA (e.g., Formulas (Ia)-(Ia-5), (Ib)-(If-1), (IIa)-(IIp), (IIb-1), (IIb-2), (IIc-1)-(IIc-2), (IIn-1), (IIn-2), (IVa)-(IVl), and (IXa)-(IXr)), R⁵ and one or more of R^{1′}, R^{1″}, R^{2′}, or R^{2″} join together to form optionally substituted alkylene or optionally substituted heteroalkylene and, taken together with the carbons to which they are attached, provide an optionally substituted heterocyclyl (e.g., a bicyclic, tricyclic, or tetracyclic heterocyclyl, R⁵ and one or more of R^{1′}, R^{1″}, R^{2′}, or R^{2″} join together to form heteroalkylene (e.g., —(CH₂)_{b1}O(CH₂)_{b2}O(CH₂)_{b3}—, wherein each of b1, b2, and b3 are, independently, an integer from 0 to 3).

[0296] In some embodiments of the polynucleotides, primary constructs, nucleic acids or modified RNA (e.g., Formulas (Ia)-(Ia-5), (Ib)-(If-1), (IIa)-(IIp), (IIb-1), (IIb-2), (IIc-1)-(IIc-2), (IIn-1), (IIn-2), (IVa)-(IVl), and (IXa)-(IXr)), each Y² is, independently, O, S, or —NR^{N1}—, wherein R^{N1} is H, optionally substituted alkyl, optionally substituted alkenyl, optionally substituted alkynyl, or optionally substituted aryl. In particular embodiments, Y² is NR^{N1}—, wherein R^{N1} is H or optionally substituted alkyl (e.g., C₁₋₆ alkyl, such as methyl, ethyl, isopropyl, or n-propyl).

[0297] In some embodiments of the polynucleotides, primary constructs, nucleic acids or modified RNA (e.g., Formulas (Ia)-(Ia-5), (Ib)-(If-1), (IIa)-(IIp), (IIb-1), (IIb-2), (IIc-1)-(IIc-2), (IIn-1), (IIn-2), (IVa)-(IVl), and (IXa)-(IXr)), each Y³ is, independently, O or S.

[0298] In some embodiments of the polynucleotides, primary constructs, nucleic acids or modified RNA (e.g., Formulas (Ia)-(Ia-5), (Ib)-(If-1), (IIa)-(IIp), (IIb-1), (IIb-2), (IIc-1)-(IIc-2), (IIn-1), (IIn-2), (IVa)-(IVl), and (IXa)-(IXr)), R¹ is H; each R² is, independently, H, halo (e.g., fluoro), hydroxy, optionally substituted alkoxy (e.g., methoxy or ethoxy), or optionally substituted alkoxyalkoxy (e.g., —(CH₂)ₛ₂(OCH₂CH₂)ₛ₁(CH₂)ₛ₃OR′, wherein s1 is an integer from 1 to 10 (e.g., from 1 to 6 or from 1 to 4), each of s2 and s3, independently, is an integer from 0 to 10 (e.g., from 0 to 4, from 0 to 6, from 1 to 4, from 1 to 6, or from 1 to 10), and R′ is H or C₁₋₂₀ alkyl, such as wherein s2 is 0, s1 is 1 or 2, s3 is 0 or 1, and R′ is C₁₋₆ alkyl); each Y² is, independently, O or —NR^{N1}—, wherein R^{N1} is H, optionally substituted alkyl, optionally substituted alkenyl, optionally substituted alkynyl, or optionally substituted aryl (e.g., wherein R^{N1} is H or optionally substituted alkyl (e.g., C₁₋₆ alkyl, such as methyl, ethyl, isopropyl, or n-propyl)); and each Y³ is, independently, O or S (e.g., S). In further embodiments, R³ is H, halo (e.g., fluoro), hydroxy, optionally substituted alkyl, optionally substituted alkoxy (e.g., methoxy or ethoxy), or optionally substituted alkoxyalkoxy. In yet further embodiments, each Y¹ is, independently, O or —NR^{N1}—, wherein R^{N1} is H, optionally substituted alkyl, optionally substituted alkenyl, optionally substituted alkynyl, or optionally substituted aryl (e.g., wherein R^{N1} is H or optionally substituted alkyl (e.g., C₁₋₆ alkyl, such as methyl, ethyl, isopropyl, or n-propyl)); and each Y⁴ is, independently, H, hydroxy, thiol, optionally substituted alkyl, optionally substituted alkoxy, optionally substituted thioalkoxy, optionally substituted alkoxyalkoxy, or optionally substituted amino.

[0299] In some embodiments of the polynucleotides, primary constructs, nucleic acids or modified RNA (e.g., Formulas (Ia)-(Ia-5), (Ib)-(If-1), (IIa)-(IIp), (IIb-1), (IIb-2), (IIc-1)-(IIc-2), (IIn-1), (IIn-2), (IVa)-(IVl), and (IXa)-(IXr)), each R¹ is, independently, H, halo (e.g., fluoro), hydroxy, optionally substituted alkoxy (e.g., methoxy or ethoxy), or optionally substituted alkoxyalkoxy (e.g., —(CH₂)ₛ₂(OCH₂CH₂)ₛ₁(CH₂)ₛ₃OR′, wherein s1 is an integer from 1 to 10 (e.g., from 1 to 6 or from 1 to 4), each of s2 and s3, independently, is an integer from 0 to 10 (e.g., from 0 to 4, from 0 to 6, from 1 to 4, from 1 to 6, or from 1 to 10), and R′ is H or C₁₋₂₀ alkyl, such as wherein s2 is 0, s1 is 1 or 2, s3 is 0 or 1, and R′ is C₁₋₆ alkyl); R² is H; each Y² is, independently, O or —NR^{N1}—, wherein R^{N1} is H, optionally substituted alkyl, optionally substituted alkenyl, optionally substituted alkynyl, or optionally substituted aryl (e.g., wherein R^{N1} is H or optionally substituted alkyl (e.g., C₁₋₆ alkyl, such as methyl, ethyl, isopropyl, or n-propyl)); and each Y³ is, independently, O or S (e.g., S). In further embodiments, R³ is H, halo (e.g., fluoro), hydroxy, optionally substituted alkyl, optionally substituted alkoxy (e.g., methoxy or ethoxy), or optionally substituted alkoxyalkoxy. In yet further embodiments, each Y¹ is, independently, O or —NR^{N1}—, wherein R^{N1} is H, optionally substituted alkyl, optionally substituted alkenyl, optionally substituted alkynyl, or optionally substituted aryl (e.g., wherein R^{N1} is H or optionally substituted alkyl (e.g., C₁₋₆ alkyl, such as methyl, ethyl, isopropyl, or n-propyl)); and each Y⁴ is, independently, H, hydroxy, thiol, optionally substituted alkyl, optionally substituted alkoxy, optionally substituted thioalkoxy, optionally substituted alkoxyalkoxy, or optionally substituted amino.

[0300] In some embodiments of the polynucleotides, primary constructs, nucleic acids or modified RNA (e.g., Formulas (Ia)-(Ia-5), (Ib)-(If-1), (IIa)-(IIp), (IIb-1), (IIb-2), (IIc-1)-(IIc-2), (IIn-1), (IIn-2), (IVa)-(IVl), and (IXa)-(IXr)), the ring including U is in the β-D (e.g., β-D-ribo) configuration.

[0301] In some embodiments of the polynucleotides, primary constructs, nucleic acids or modified RNA (e.g., Formulas (Ia)-(Ia-5), (Ib)-(If-1), (IIa)-(IIp), (IIb-1), (IIb-2), (IIc-1)-(IIc-2), (IIn-1), (IIn-2), (IVa)-(IVl), and (IXa)-(IXr)), the ring including U is in the α-L (e.g., α-L-ribo) configuration.

[0302] In some embodiments of the polynucleotides, primary constructs, nucleic acids or modified RNA (e.g., Formulas (Ia)-(Ia-5), (Ib)-(If-1), (IIa)-(IIp), (IIb-1), (IIb-2), (IIc-1)-(IIc-2), (IIn-1), (IIn-2), (IVa)-(IVl), and (IXa)-(IXr)), one or more B is not pseudouridine (ψ) or 5-methyl-cytidine (m⁵C).

[0303] In some embodiments, about 10% to about 100% of n number of B nucleobases is not ψ or m⁵C (e.g., from 10% to 20%, from 10% to 35%, from 10% to 50%, from 10% to 60%, from 10% to 75%, from 10% to 90%, from 10% to 95%, from 10% to 98%, from 10% to 99%, from 20% to 35%, from 20% to 50%, from 20% to 60%, from 20% to 75%, from 20% to 90%, from 20% to 95%, from 20% to 98%, from 20% to 99%, from 20% to 100%, from 50% to 60%, from 50% to 75%, from 50% to 90%, from 50% to 95%, from 50% to 98%, from 50% to 99%, from 50% to 100%, from 75% to 90%, from 75% to 95%, from 75% to 98%, from 75% to 99%, and from 75% to 100% of n number of B is not ψ or m⁵C). In some embodiments, B is not w or m⁵C.

[0304] In some embodiments of the polynucleotides (e.g., Formulas (Ia)-(Ia-5), (Ib)-(If-1), (IIa)-(IIp), (IIb-1), (IIb-2), (IIc-1)-(IIc-2), (IIn-1), (IIn-2), (IVa)-(IVl), and (IXa)-(IXr)), when B is an unmodified nucleobase selected from cytosine, guanine, uracil and adenine, then at least one of Y¹, Y², or Y³ is not O.

[0305] In some embodiments, the polynucleotides, primary constructs, nucleic acids or modified RNA includes a modified ribose. In some embodiments, the polynucleotide (e.g., the first region, the first flanking region, or the second flanking region) includes n number of linked nucleosides having Formula (IIa)-(IIc):

[chemical structure]

or a pharmaceutically acceptable salt or stereoisomer thereof. In particular embodiments, U is O or C(R^{U})ₙᵤ, wherein nu is an integer from 0 to 2 and each R^{U} is, independently, H, halo, or optionally substituted alkyl (e.g., U is —CH₂— or —CH—). In other embodiments, each of R¹, R², R³, R⁴, and R⁵ is, independently, H, halo, hydroxy, thiol, optionally substituted alkyl, optionally substituted alkoxy, optionally substituted alkenyloxy, optionally substituted alkynyloxy, optionally substituted aminoalkoxy, optionally substituted alkoxyalkoxy, optionally substituted hydroxyalkoxy, optionally substituted amino, azido, optionally substituted aryl, optionally substituted aminoalkyl, optionally substituted aminoalkenyl, optionally substituted aminoalkynyl, or absent (e.g., each R¹ and R² is, independently H, halo, hydroxy, optionally substituted alkyl, or optionally substituted alkoxy; each R³ and R⁴ is, independently, H or optionally substituted alkyl; and R⁵ is H or hydroxy), and - - - is a single bond or double bond.

[0306] In particular embodiments, the polynucleotides, primary constructs, nucleic acids or modified RNA (e.g., the first region, the first flanking region, or the second flanking region) includes n number of linked nucleosides having Formula (IIb-1)-(IIb-2):

[chemical structure]

or a pharmaceutically acceptable salt or stereoisomer thereof. In some embodiments, U is O or C(R^{U})ₙᵤ, wherein nu is an integer from 0 to 2 and each R^{U} is, independently, H, halo, or optionally substituted alkyl (e.g., U is —CH₂— or —CH—). In other embodiments, each of R¹ and R² is, independently, H, halo, hydroxy, thiol, optionally substituted alkyl, optionally substituted alkoxy, optionally substituted alkenyloxy, optionally substituted alkynyloxy, optionally substituted aminoalkoxy, optionally substituted alkoxyalkoxy, optionally substituted hydroxyalkoxy, optionally substituted amino, azido, optionally substituted aryl, optionally substituted aminoalkyl, optionally substituted aminoalkenyl, optionally substituted aminoalkynyl, or absent (e.g., each R¹ and R² is, independently, H, halo, hydroxy, optionally substituted alkyl, or optionally substituted alkoxy, e.g., H, halo, hydroxy, alkyl, or alkoxy). In particular embodiments, R² is hydroxy or optionally substituted alkoxy (e.g., methoxy, ethoxy, or any described herein).

[0307] In particular embodiments, the polynucleotides, primary constructs, nucleic acids or modified RNA (e.g., the first region, the first flanking region, or the second flanking region) includes n number of linked nucleosides having Formula (IIc-1)-(IIc-4):

[chemical structure]

or a pharmaceutically acceptable salt or stereoisomer thereof.

[0308] In some embodiments, U is O or C(R^{U})ₙᵤ, wherein nu is an integer from 0 to 2 and each R^{U} is, independently, H, halo, or optionally substituted alkyl (e.g., U is —CH₂— or —CH—). In some embodiments, each of R¹, R², and R³ is, independently, H, halo, hydroxy, thiol, optionally substituted alkyl, optionally substituted alkoxy, optionally substituted alkenyloxy, optionally substituted alkynyloxy, optionally substituted aminoalkoxy, optionally substituted alkoxyalkoxy, optionally substituted hydroxyalkoxy, optionally substituted amino, azido, optionally substituted aryl, optionally substituted aminoalkyl, optionally substituted aminoalkenyl, optionally substituted aminoalkynyl, or absent (e.g., each R¹ and R² is, independently, H, halo, hydroxy, optionally substituted alkyl, or optionally substituted alkoxy, e.g., H, halo, hydroxy, alkyl, or alkoxy; and each R³ is, independently, H or optionally substituted alkyl)). In particular embodiments, R² is optionally substituted alkoxy (e.g., methoxy or ethoxy, or any described herein). In particular embodiments, R¹ is optionally substituted alkyl, and R² is hydroxy. In other embodiments, R¹ is hydroxy, and R² is optionally substituted alkyl. In further embodiments, R³ is optionally substituted alkyl.

[0309] In some embodiments, the polynucleotides, primary constructs, nucleic acids or modified RNA includes an acyclic modified ribose. In some embodiments, the polynucleotide (e.g., the first region, the first flanking region, or the second flanking region) includes n number of linked nucleosides having Formula (IId)-(IIf):

[chemical structure]

or a pharmaceutically acceptable salt or stereoisomer thereof.

[0310] In some embodiments, the polynucleotides, primary constructs, nucleic acids or modified RNA includes an acyclic modified hexitol. In some embodiments, the polynucleotide (e.g., the first region, the first flanking region, or the second flanking region) includes n number of linked nucleosides having Formula (IIg)-(IIj):

[chemical structure]

or a pharmaceutically acceptable salt or stereoisomer thereof

[0311] In some embodiments, the polynucleotides, primary constructs, nucleic acids or modified RNA includes a sugar moiety having a contracted or an expanded ribose ring. In some embodiments, the polynucleotide (e.g., the first region, the first flanking region, or the second flanking region) includes n number of linked nucleosides having Formula (IIk)-(IIm):

[chemical structure]

or a pharmaceutically acceptable salt or stereoisomer thereof, wherein each of R^{1′}, R^{1″}, R^{2′}, and R^{2″} is, independently, H, halo, hydroxy, optionally substituted alkyl, optionally substituted alkoxy, optionally substituted alkenyloxy, optionally substituted alkynyloxy, optionally substituted aminoalkoxy, optionally substituted alkoxyalkoxy, or absent; and wherein the combination of R^{2′} and R³ or the combination of R^{2″} and R³ can be taken together to form optionally substituted alkylene or optionally substituted heteroalkylene.

[0312] In some embodiments, the polynucleotides, primary constructs, nucleic acids or modified RNA includes a locked modified ribose. In some embodiments, the polynucleotide (e.g., the first region, the first flanking region, or the second flanking region) includes n number of linked nucleosides having Formula (IIn):

[chemical structure]

or a pharmaceutically acceptable salt or stereoisomer thereof, wherein R^{3′} is O, S, or —NR^{N1}—, wherein R^{N1} is H, optionally substituted alkyl, optionally substituted alkenyl, optionally substituted alkynyl, or optionally substituted aryl and R^{3″} is optionally substituted alkylene (e.g., —CH₂—, —CH₂CH₂—, or —CH₂CH₂CH₂—) or optionally substituted heteroalkylene (e.g., —CH₂NH—, —CH₂CH₂NH—, —CH₂OCH₂—, or —CH₂CH₂OCH₂—) (e.g., R^{3′} is O and R^{3″} is optionally substituted alkylene (e.g., —CH₂—, —CH₂CH₂—, or —CH₂CH₂CH₂—)).

[0313] In some embodiments, the polynucleotides, primary constructs, nucleic acids or modified RNA (e.g., the first region, the first flanking region, or the second flanking region) includes n number of linked nucleosides having Formula (IIn-1)-(II-n2):

[chemical structure]

or a pharmaceutically acceptable salt or stereoisomer thereof, wherein R^{3′} is O, S, or —NR^{N1}—, wherein R^{N1} is H, optionally substituted alkyl, optionally substituted alkenyl, optionally substituted alkynyl, or optionally substituted aryl and R^{3″} is optionally substituted alkylene (e.g., —CH₂—, —CH₂CH₂—, or —CH₂CH₂CH₂—) or optionally substituted heteroalkylene (e.g., —CH₂NH—, —CH₂CH₂NH—, —CH₂OCH₂—, or —CH₂CH₂OCH₂—) (e.g., R^{3′} is O and R^{3″} is optionally substituted alkylene (e.g., —CH₂—, —CH₂CH₂—, or —CH₂CH₂CH₂—)).

[0314] In some embodiments, the polynucleotides, primary constructs, nucleic acids or modified RNA includes a locked modified ribose that forms a tetracyclic heterocyclyl. In some embodiments, the polynucleotides, primary constructs, nucleic acids or modified RNA (e.g., the first region, the first flanking region, or the second flanking region) includes n number of linked nucleosides having Formula (IIo):

[chemical structure]

or a pharmaceutically acceptable salt or stereoisomer thereof, wherein R^{12a}, R^{12c}, T^{1′}, T^{1″}, T^{2′}, T^{2″}, V¹, and V³ are as described herein.

[0315] Any of the formulas for the polynucleotides, primary constructs, nucleic acids or modified RNA can include one or more nucleobases described herein (e.g., Formulas (b1)-(b43)).

[0316] In one embodiment, the present invention provides methods of preparing a nucleic acid or modified RNA, wherein the nucleic acid or modified RNA comprises n number of nucleosides having Formula (Ia), as defined herein:

[chemical structure]

the method comprising reacting a compound of Formula (IIIa), as defined herein:

[chemical structure]

[0317] with an RNA polymerase, and a cDNA template.

[0318] In a further embodiment, the present invention provides methods of amplifying a nucleic acid or modified RNA comprising: reacting a compound of Formula (Ma), as defined herein, with a primer, a cDNA template, and an RNA polymerase.

[0319] In one embodiment, the present invention provides methods of preparing a nucleic acids or modified, wherein the polynucleotides, primary constructs, nucleic acids or modified RNA comprises n number of nucleosides having Formula (Ia-1), as defined herein:

[chemical structure]

the method comprising reacting a compound of Formula (IIIa-1), as defined herein:

[chemical structure]

with an RNA polymerase, and a cDNA template.

[0320] In a further embodiment, the present invention provides methods of amplifying a polynucleotides, primary constructs, nucleic acids or modified RNA comprising at least one nucleotide (e.g., building block molecule), the method comprising: reacting a compound of Formula (IIIa-1), as defined herein, with a primer, a cDNA template, and an RNA polymerase.

[0321] In one embodiment, the present invention provides methods of preparing a polynucleotides, primary constructs, nucleic acids or modified RNA, wherein the polynucleotides, primary constructs, nucleic acids or modified RNA comprises n number of nucleosides having Formula (Ia-2), as defined herein:

[chemical structure]

the method comprising reacting a compound of Formula (IIIa-2), as defined herein:

[chemical structure]

with an RNA polymerase, and a cDNA template.

[0322] In a further embodiment, the present invention provides methods of amplifying a polynucleotides, primary constructs, nucleic acids or modified RNA comprising at least one nucleotide (e.g., modified mRNA molecule), the method comprising reacting a compound of Formula (IIIa-2), as defined herein, with a primer, a cDNA template, and an RNA polymerase.

[0323] In some embodiments, the reaction may be repeated from 1 to about 7,000 times. In any of the embodiments herein, B may be a nucleobase of Formula (b1)-(b43).

[0324] The polynucleotides, primary constructs, nucleic acids or modified RNA can optionally include 5′ and/or 3′ flanking regions, which are described herein.

### Modified Nucleotides and Nucleosides

[0325] The present invention also includes the building blocks, e.g., modified ribonucleosides, modified ribonucleotides, of the polynucleotides, primary constructs, nucleic acids or modified RNA, e.g., modified RNA (or mRNA) molecules. For example, these building blocks can be useful for preparing the polynucleotides, primary constructs, nucleic acids or modified RNA of the invention.

[0326] In some embodiments, the building block molecule has Formula (Ma) or (IIIa-1):

[chemical structure]

or a pharmaceutically acceptable salt or stereoisomer thereof, wherein the substituents are as described herein (e.g., for Formula (Ia) and (Ia-1)), and wherein when B is an unmodified nucleobase selected from cytosine, guanine, uracil and adenine, then at least one of Y¹, Y², or Y³ is not O.

[0327] In some embodiments, the building block molecule, which may be incorporated into a polynucleotides, primary constructs, nucleic acids or modified RNA, has Formula (IVa)-(IVb):

[chemical structure]

[0328] or a pharmaceutically acceptable salt or stereoisomer thereof, wherein B is as described herein (e.g., any one of (b1)-(b43)).

[0329] In particular embodiments, Formula (IVa) or (IVb) is combined with a modified uracil (e.g., any one of formulas (b1)-(b9), (b21)-(b23), and (b28)-(b31), such as formula (b1), (b8), (b28), (b29), or (b30)). In particular embodiments, Formula (IVa) or (IVb) is combined with a modified cytosine (e.g., any one of formulas (b10)-(b14), (b24), (b25), and (b32)-(b36), such as formula (b10) or (b32)). In particular embodiments, Formula (IVa) or (IVb) is combined with a modified guanine (e.g., any one of formulas (b15)-(b17) and (b37)-(b40)). In particular embodiments, Formula (IVa) or (IVb) is combined with a modified adenine (e.g., any one of formulas (b18)-(b20) and (b41)-(b43)).

[0330] In some embodiments, the building block molecule, which may be incorporated into a polynucleotides, primary constructs, nucleic acids or modified RNA, has Formula (IVc)-(IVk):

[chemical structure]

[chemical structure]

or a pharmaceutically acceptable salt or stereoisomer thereof, wherein B is as described herein (e.g., any one of (b1)-(b43)).

[0331] In particular embodiments, one of Formulas (IVc)-(IVk) is combined with a modified uracil (e.g., any one of formulas (b1)-(b9), (b21)-(b23), and (b28)-(b31), such as formula (b1), (b8), (b28), (b29), or (b30)).

[0332] In particular embodiments, one of Formulas (IVc)-(IVk) is combined with a modified cytosine (e.g., any one of formulas (b10)-(b14), (b24), (b25), and (b32)-(b36), such as formula (b10) or (b32)).

[0333] In particular embodiments, one of Formulas (IVc)-(IVk) is combined with a modified guanine (e.g., any one of formulas (b15)-(b17) and (b37)-(b40)).

[0334] In particular embodiments, one of Formulas (IVc)-(IVk) is combined with a modified adenine (e.g., any one of formulas (b18)-(b20) and (b41)-(b43)).

[0335] In other embodiments, the building block molecule, which may be incorporated into a polynucleotides, primary constructs, nucleic acids or modified RNA has Formula (Va) or (Vb):

[chemical structure]

or a pharmaceutically acceptable salt or stereoisomer thereof, wherein B is as described herein (e.g., any one of (b1)-(b43)).

[0336] In other embodiments, the building block molecule, which may be incorporated into a polynucleotides, primary constructs, nucleic acids or modified RNA has Formula (IXa)-(IXd):

[chemical structure]

or a pharmaceutically acceptable salt or stereoisomer thereof, wherein B is as described herein (e.g., any one of (b1)-(b43)).
In particular embodiments, one of Formulas (IXa)-(IXd) is combined with a modified uracil (e.g., any one of formulas (b1)-(b9), (b21)-(b23), and (b28)-(b31), such as formula (b1), (b8), (b28), (b29), or (b30)). In particular embodiments, one of Formulas (IXa)-(IXd) is combined with a modified cytosine (e.g., any one of formulas (b10)-(b14), (b24), (b25), and (b32)-(b36), such as formula (b10) or (b32)).
In particular embodiments, one of Formulas (IXa)-(IXd) is combined with a modified guanine (e.g., any one of formulas (b15)-(b17) and (b37)-(b40)).
In particular embodiments, one of Formulas (IXa)-(IXd) is combined with a modified adenine (e.g., any one of formulas (b18)-(b20) and (b41)-(b43)).

[0337] In other embodiments, the building block molecule, which may be incorporated into a polynucleotides, primary constructs, nucleic acids or modified RNA has Formula (IXe)-(IXg):

[chemical structure]

or a pharmaceutically acceptable salt or stereoisomer thereof, wherein B is as described herein (e.g., any one of (b1)-(b43)).

[0338] In particular embodiments, one of Formulas (IXe)-(IXg) is combined with a modified uracil (e.g., any one of formulas (b1)-(b9), (b21)-(b23), and (b28)-(b31), such as formula (b1), (b8), (b28), (b29), or (b30)).

[0339] In particular embodiments, one of Formulas (IXe)-(IXg) is combined with a modified cytosine (e.g., any one of formulas (b10)-(b14), (b24), (b25), and (b32)-(b36), such as formula (b10) or (b32)).

[0340] In particular embodiments, one of Formulas (IXe)-(IXg) is combined with a modified guanine (e.g., any one of formulas (b15)-(b17) and (b37)-(b40)).

[0341] In particular embodiments, one of Formulas (IXe)-(IXg) is combined with a modified adenine (e.g., any one of formulas (b18)-(b20) and (b41)-(b43)).

[0342] In other embodiments, the building block molecule, which may be incorporated into a polynucleotides, primary constructs, nucleic acids or modified RNA has Formula (IXh)-(IXk):

[chemical structure]

or a pharmaceutically acceptable salt or stereoisomer thereof, wherein B is as described herein (e.g., any one of (b1)-(b43)). In particular embodiments, one of Formulas (IXh)-(IXk) is combined with a modified uracil (e.g., any one of formulas (b1)-(b9), (b21)-(b23), and (b28)-(b31), such as formula (b1), (b8), (b28), (b29), or (b30)). In particular embodiments, one of Formulas (IXh)-(IXk) is combined with a modified cytosine (e.g., any one of formulas (b10)-(b14), (b24), (b25), and (b32)-(b36), such as formula (b10) or (b32)).

[0343] In particular embodiments, one of Formulas (IXh)-(IXk) is combined with a modified guanine (e.g., any one of formulas (b15)-(b17) and (b37)-(b40)). In particular embodiments, one of Formulas (IXh)-(IXk) is combined with a modified adenine (e.g., any one of formulas (b18)-(b20) and (b41)-(b43)).

[0344] In other embodiments, the building block molecule, which may be incorporated into a polynucleotides, primary constructs, nucleic acids or modified RNA has Formula (IXl)-(IXr):

[chemical structure]

or a pharmaceutically acceptable salt or stereoisomer thereof, wherein each r1 and r2 is, independently, an integer from 0 to 5 (e.g., from 0 to 3, from 1 to 3, or from 1 to 5) and B is as described herein (e.g., any one of (b1)-(b43)).

[0345] In particular embodiments, one of Formulas (IXl)-(IXr) is combined with a modified uracil (e.g., any one of formulas (b1)-(b9), (b21)-(b23), and (b28)-(b31), such as formula (b1), (b8), (b28), (b29), or (b30)).

[0346] In particular embodiments, one of Formulas (IXl)-(IXr) is combined with a modified cytosine (e.g., any one of formulas (b10)-(b14), (b24), (b25), and (b32)-(b36), such as formula (b10) or (b32)).

[0347] In particular embodiments, one of Formulas (IXl)-(IXr) is combined with a modified guanine (e.g., any one of formulas (b15)-(b17) and (b37)-(b40)). In particular embodiments, one of Formulas (IXl)-(IXr) is combined with a modified adenine (e.g., any one of formulas (b18)-(b20) and (b41)-(b43)).

[0348] In some embodiments, the building block molecule, which may be incorporated into a polynucleotides, primary constructs, nucleic acids or modified RNA can be selected from the group consisting of:

[chemical structure]

[chemical structure]

or a pharmaceutically acceptable salt or stereoisomer thereof, wherein each r is, independently, an integer from 0 to 5 (e.g., from 0 to 3, from 1 to 3, or from 1 to 5).

[0349] In some embodiments, the building block molecule, which may be incorporated into a polynucleotides, primary constructs, nucleic acids or modified RNA can be selected from the group consisting of:

[chemical structure]

[chemical structure]

or a pharmaceutically acceptable salt or stereoisomer thereof, wherein each r is, independently, an integer from 0 to 5 (e.g., from 0 to 3, from 1 to 3, or from 1 to 5) and s1 is as described herein.

[0350] In some embodiments, the building block molecule, which may be incorporated into a nucleic acid (e.g., RNA, mRNA, or modified RNA), is a modified uridine (e.g., selected from the group consisting of:

[chemical structure]

[chemical structure]

[chemical structure]

[chemical structure]

[chemical structure]

[chemical structure]

[chemical structure]

[chemical structure]

[chemical structure]

[chemical structure]

[chemical structure]

[chemical structure]

[chemical structure]

[chemical structure]

[chemical structure]

[chemical structure]

[chemical structure]

[chemical structure]

[chemical structure]

[chemical structure]

[chemical structure]

or a pharmaceutically acceptable salt or stereoisomer thereof, wherein Y¹, Y³, Y⁴, Y⁶, and r are as described herein (e.g., each r is, independently, an integer from 0 to 5, such as from 0 to 3, from 1 to 3, or from 1 to 5)).

[0351] In some embodiments, the building block molecule, which may be incorporated into a polynucleotides, primary constructs, nucleic acids or modified RNA is a modified cytidine (e.g., selected from the group consisting of:

[chemical structure]

[chemical structure]

[chemical structure]

[chemical structure]

[chemical structure]

[chemical structure]

[chemical structure]

or a pharmaceutically acceptable salt or stereoisomer thereof, wherein Y¹, Y³, Y⁴, Y⁶, and r are as described herein (e.g., each r is, independently, an integer from 0 to 5, such as from 0 to 3, from 1 to 3, or from 1 to 5)). For example, the building block molecule, which may be incorporated into a polynucleotides, primary constructs, nucleic acids or modified RNA can be:

[chemical structure]

or a pharmaceutically acceptable salt or stereoisomer thereof, wherein each r is, independently, an integer from 0 to 5 (e.g., from 0 to 3, from 1 to 3, or from 1 to 5).

[0352] In some embodiments, the building block molecule, which may be incorporated into a polynucleotides, primary constructs, nucleic acids or modified RNA is a modified adenosine (e.g., selected from the group consisting of:

[chemical structure]

[chemical structure]

[chemical structure]

[chemical structure]

[chemical structure]

[chemical structure]

[chemical structure]

[chemical structure]

or a pharmaceutically acceptable salt or stereoisomer thereof, wherein Y¹, Y³, Y⁴, Y⁶, and r are as described herein (e.g., each r is, independently, an integer from 0 to 5, such as from 0 to 3, from 1 to 3, or from 1 to 5)).

[0353] In some embodiments, the building block molecule, which may be incorporated into a polynucleotides, primary constructs, nucleic acids or modified RNA, is a modified guanosine (e.g., selected from the group consisting of:

[chemical structure]

[chemical structure]

[chemical structure]

[chemical structure]

[chemical structure]

[chemical structure]

[chemical structure]

[chemical structure]

or a pharmaceutically acceptable salt or stereoisomer thereof, wherein Y¹, Y³, Y⁴, Y⁶, and r are as described herein (e.g., each r is, independently, an integer from 0 to 5, such as from 0 to 3, from 1 to 3, or from 1 to 5)).

[0354] In some embodiments, the chemical modification can include replacement of C group at C-5 of the ring (e.g., for a pyrimidine nucleoside, such as cytosine or uracil) with N (e.g., replacement of the >CH group at C-5 with >NR^{N1} group, wherein R^{N1} is H or optionally substituted alkyl). For example, the building block molecule, which may be incorporated into a polynucleotides, primary constructs, nucleic acids or modified RNA can be:

[chemical structure]

or a pharmaceutically acceptable salt or stereoisomer thereof, wherein each r is, independently, an integer from 0 to 5 (e.g., from 0 to 3, from 1 to 3, or from 1 to 5).

[0355] In another embodiment, the chemical modification can include replacement of the hydrogen at C-5 of cytosine with halo (e.g., Br, Cl, F, or I) or optionally substituted alkyl (e.g., methyl). For example, the building block molecule, which may be incorporated into a polynucleotides, primary constructs, nucleic acids or modified RNA can be:

[chemical structure]

or a pharmaceutically acceptable salt or stereoisomer thereof, wherein each r is, independently, an integer from 0 to 5 (e.g., from 0 to 3, from 1 to 3, or from 1 to 5).

[0356] In yet a further embodiment, the chemical modification can include a fused ring that is formed by the NH₂ at the C-4 position and the carbon atom at the C-5 position. For example, the building block molecule, which may be incorporated into a polynucleotides, primary constructs, nucleic acids or modified RNA can be:

[chemical structure]

or a pharmaceutically acceptable salt or stereoisomer thereof, wherein each r is, independently, an integer from 0 to 5 (e.g., from 0 to 3, from 1 to 3, or from 1 to 5).

### Modifications on the Sugar

[0357] The modified nucleosides and nucleotides (e.g., building block molecules), which may be incorporated into a polynucleotides, primary constructs, nucleic acids or modified RNA (e.g., RNA or mRNA, as described herein), can be modified on the sugar of the ribonucleic acid. For example, the 2′ hydroxyl group (OH) can be modified or replaced with a number of different substituents. Exemplary substitutions at the 2′-position include, but are not limited to, H, halo, optionally substituted C₁₋₆ alkyl; optionally substituted C₁₋₆ alkoxy; optionally substituted C₆₋₁₀ aryloxy; optionally substituted C₃₋₈ cycloalkyl; optionally substituted C₃₋₈ cycloalkoxy; optionally substituted C₆₋₁₀ aryloxy; optionally substituted C₆₋₁₀ aryl-C₁₋₆ alkoxy, optionally substituted C₁₋₁₂ (heterocyclyl)oxy; a sugar (e.g., ribose, pentose, or any described herein); a polyethyleneglycol (PEG), —O(CH₂CH₂O)ₙCH₂CH₂OR, where R is H or optionally substituted alkyl, and n is an integer from 0 to 20 (e.g., from 0 to 4, from 0 to 8, from 0 to 10, from 0 to 16, from 1 to 4, from 1 to 8, from 1 to 10, from 1 to 16, from 1 to 20, from 2 to 4, from 2 to 8, from 2 to 10, from 2 to 16, from 2 to 20, from 4 to 8, from 4 to 10, from 4 to 16, and from 4 to 20); “locked” nucleic acids (LNA) in which the 2′-hydroxyl is connected by a C₁₋₆ alkylene or C₁₋₆ heteroalkylene bridge to the 4′-carbon of the same ribose sugar, where exemplary bridges included methylene, propylene, ether, or amino bridges; aminoalkyl, as defined herein; aminoalkoxy, as defined herein; amino as defined herein; and amino acid, as defined herein

[0358] Generally, RNA includes the sugar group ribose, which is a 5-membered ring having an oxygen. Exemplary, non-limiting modified nucleotides include replacement of the oxygen in ribose (e.g., with S, Se, or alkylene, such as methylene or ethylene); addition of a double bond (e.g., to replace ribose with cyclopentenyl or cyclohexenyl); ring contraction of ribose (e.g., to form a 4-membered ring of cyclobutane or oxetane); ring expansion of ribose (e.g., to form a 6- or 7-membered ring having an additional carbon or heteroatom, such as for anhydrohexitol, altritol, mannitol, cyclohexanyl, cyclohexenyl, and morpholino that also has a phosphoramidate backbone); multicyclic forms (e.g., tricyclo; and “unlocked” forms, such as glycol nucleic acid (GNA) (e.g., R-GNA or S-GNA, where ribose is replaced by glycol units attached to phosphodiester bonds), threose nucleic acid (TNA, where ribose is replace with α-L-threofuranosyl-(3′→2′)), and peptide nucleic acid (PNA, where 2-amino-ethyl-glycine linkages replace the ribose and phosphodiester backbone). The sugar group can also contain one or more carbons that possess the opposite stereochemical configuration than that of the corresponding carbon in ribose. Thus, a polynucleotides, primary constructs, nucleic acids or modified RNA molecule can include nucleotides containing, e.g., arabinose, as the sugar.

### Modifications on the Nucleobase

[0359] The modified mRNAs may be synthesized chemically, enzymatically or recombinantly to include one or more modified or non-natural nucleosides.

[0360] The present disclosure provides for modified nucleosides and nucleotides. As described herein “nucleoside” is defined as a compound containing a sugar molecule (e.g., a pentose or ribose) or derivative thereof in combination with an organic base (e.g., a purine or pyrimidine) or a derivative thereof (also referred to herein as “nucleobase”). As described herein, “nucleotide” is defined as a nucleoside including a phosphate group. The modified nucleotides may by synthesized by any useful method, as described herein (e.g., chemically, enzymatically, or recombinantly to include one or more modified or non-natural nucleosides).

[0361] The modified nucleotide base pairing encompasses not only the standard adenosine-thymine, adenosine-uracil, or guanosine-cytosine base pairs, but also base pairs formed between nucleotides and/or modified nucleotides comprising non-standard or modified bases, wherein the arrangement of hydrogen bond donors and hydrogen bond acceptors permits hydrogen bonding between a non-standard base and a standard base or between two complementary non-standard base structures. One example of such non-standard base pairing is the base pairing between the modified nucleotide inosine and adenine, cytosine or uracil.

[0362] The modified nucleosides and nucleotides can include a modified nucleobase. Examples of nucleobases found in RNA include, but are not limited to, adenine, guanine, cytosine, and uracil. Examples of nucleobase found in DNA include, but are not limited to, adenine, guanine, cytosine, and thymine. These nucleobases can be modified or wholly replaced to provide polynucleotides, primary constructs, nucleic acids or modified RNA molecules having enhanced properties, e.g., resistance to nucleases, stability, and these properties may manifest through disruption of the binding of a major groove binding partner.

[0363] Table 8 below identifies the chemical faces of each canonical nucleotide. Circles identify the respective chemical regions.

TABLE 8

| | | | Watson-Crick |
|---|---|---|---|
| | Major Groove Face | Minor Groove Face | Base-pairing Face |
| Pyrimidines | | | |
| Cytidine: | [chemical structure] | [chemical structure] | [chemical structure] |
| Uridine: | [chemical structure] | [chemical structure] | [chemical structure] |
| Purines | | | |
| Adenosine: | [chemical structure] | [chemical structure] | [chemical structure] |
| Guanosine: | [chemical structure] | [chemical structure] | [chemical structure] |

[0364] In some embodiments, B is a modified uracil. Exemplary modified uracils include those having Formula (b1)-(b5):

[chemical structure]

or a pharmaceutically acceptable salt or stereoisomer thereof, wherein

[0365] [symbol] is a single or double bond;

[0366] each of T^{1′}, T^{1″}, T^{2′}, and T^{2″} is, independently, H, optionally substituted alkyl, optionally substituted alkoxy, or optionally substituted thioalkoxy, or the combination of T^{1′} and T^{1″} or the combination of T^{2′} and T^{2″} join together (e.g., as in T²) to form O (oxo), S (thio), or Se (seleno);

[0367] each of V¹ and V² is, independently, O, S, N(R^{Vb})ₙᵥ, or C(R^{Vb})ₙᵥ, wherein nv is an integer from 0 to 2 and each R^{Vb} is, independently, H, halo, optionally substituted amino acid, optionally substituted alkyl, optionally substituted haloalkyl, optionally substituted alkenyl, optionally substituted alkynyl, optionally substituted alkoxy, optionally substituted alkenyloxy, optionally substituted alkynyloxy, optionally substituted hydroxyalkyl, optionally substituted hydroxyalkenyl, optionally substituted hydroxyalkynyl, optionally substituted aminoalkyl (e.g., substituted with an N-protecting group, such as any described herein, e.g., trifluoroacetyl), optionally substituted aminoalkenyl, optionally substituted aminoalkynyl, optionally substituted acylaminoalkyl (e.g., substituted with an N-protecting group, such as any described herein, e.g., trifluoroacetyl), optionally substituted alkoxycarbonylalkyl, optionally substituted alkoxycarbonylalkenyl, optionally substituted alkoxycarbonylalkynyl, or optionally substituted alkoxycarbonylalkoxy (e.g., optionally substituted with any substituent described herein, such as those selected from (1)-(21) for alkyl);

[0368] R¹⁰ is H, halo, optionally substituted amino acid, hydroxy, optionally substituted alkyl, optionally substituted alkenyl, optionally substituted alkynyl, optionally substituted aminoalkyl, optionally substituted hydroxyalkyl, optionally substituted hydroxyalkenyl, optionally substituted hydroxyalkynyl, optionally substituted aminoalkenyl, optionally substituted aminoalkynyl, optionally substituted alkoxy, optionally substituted alkoxycarbonylalkyl, optionally substituted alkoxycarbonylalkenyl, optionally substituted alkoxycarbonylalkynyl, optionally substituted alkoxycarbonylalkoxy, optionally substituted carboxyalkoxy, optionally substituted carboxyalkyl, or optionally substituted carbamoylalkyl;

[0369] R¹¹ is H or optionally substituted alkyl;

[0370] R^{12a} is H, optionally substituted alkyl, optionally substituted hydroxyalkyl, optionally substituted hydroxyalkenyl, optionally substituted hydroxyalkynyl, optionally substituted aminoalkyl, optionally substituted aminoalkenyl, or optionally substituted aminoalkynyl, optionally substituted carboxyalkyl (e.g., optionally substituted with hydroxy), optionally substituted carboxyalkoxy, optionally substituted carboxyaminoalkyl, or optionally substituted carbamoylalkyl; and

[0371] R^{12c} is H, halo, optionally substituted alkyl, optionally substituted alkoxy, optionally substituted thioalkoxy, optionally substituted amino, optionally substituted hydroxyalkyl, optionally substituted hydroxyalkenyl, optionally substituted hydroxyalkynyl, optionally substituted aminoalkyl, optionally substituted aminoalkenyl, or optionally substituted aminoalkynyl.

[0372] Other exemplary modified uracils include those having Formula (b6)-(b9):

[chemical structure]

or a pharmaceutically acceptable salt or stereoisomer thereof, wherein

[0373] [symbol] is a single or double bond;

[0374] each of T^{1′}, T^{1″}, T^{2′}, and T^{2″} is, independently, H, optionally substituted alkyl, optionally substituted alkoxy, or optionally substituted thioalkoxy, or the combination of T^{1′} and T^{1″} join together (e.g., as in T¹) or the combination of T^{2′} and T^{2″} join together (e.g., as in T²) to form O (oxo), S (thio), or Se (seleno), or each T¹ and T² is, independently, O (oxo), S (thio), or Se (seleno);

[0375] each of W¹ and W² is, independently, N(R^{Wa})_{nw} or C(R^{Wa})_{nw}, wherein nw is an integer from 0 to 2 and each R^{Wa} is, independently, H, optionally substituted alkyl, or optionally substituted alkoxy;

[0376] each V³ is, independently, O, S, N(R^{Va})ₙᵥ, or C(R^{Va})ₙᵥ, wherein nv is an integer from 0 to 2 and each R^{Va} is, independently, H, halo, optionally substituted amino acid, optionally substituted alkyl, optionally substituted hydroxyalkyl, optionally substituted hydroxyalkenyl, optionally substituted hydroxyalkynyl, optionally substituted alkenyl, optionally substituted alkynyl, optionally substituted heterocyclyl, optionally substituted alkheterocyclyl, optionally substituted alkoxy, optionally substituted alkenyloxy, or optionally substituted alkynyloxy, optionally substituted aminoalkyl (e.g., substituted with an N-protecting group, such as any described herein, e.g., trifluoroacetyl, or sulfoalkyl), optionally substituted aminoalkenyl, optionally substituted aminoalkynyl, optionally substituted acylaminoalkyl (e.g., substituted with an N-protecting group, such as any described herein, e.g., trifluoroacetyl), optionally substituted alkoxycarbonylalkyl, optionally substituted alkoxycarbonylalkenyl, optionally substituted alkoxycarbonylalkynyl, optionally substituted alkoxycarbonylacyl, optionally substituted alkoxycarbonylalkoxy, optionally substituted carboxyalkyl (e.g., optionally substituted with hydroxy and/or an O-protecting group), optionally substituted carboxyalkoxy, optionally substituted carboxyaminoalkyl, or optionally substituted carbamoylalkyl (e.g., optionally substituted with any substituent described herein, such as those selected from (1)-(21) for alkyl), and wherein R^{Va} and R^{12c} taken together with the carbon atoms to which they are attached can form optionally substituted cycloalkyl, optionally substituted aryl, or optionally substituted heterocyclyl (e.g., a 5- or 6-membered ring);

[0377] R^{12a} is H, optionally substituted alkyl, optionally substituted hydroxyalkyl, optionally substituted hydroxyalkenyl, optionally substituted hydroxyalkynyl, optionally substituted aminoalkyl, optionally substituted aminoalkenyl, optionally substituted aminoalkynyl, optionally substituted carboxyalkyl (e.g., optionally substituted with hydroxy and/or an O-protecting group), optionally substituted carboxyalkoxy, optionally substituted carboxyaminoalkyl, optionally substituted carbamoylalkyl, or absent;

[0378] R^{12b} is H, optionally substituted alkyl, optionally substituted alkenyl, optionally substituted alkynyl, optionally substituted hydroxyalkyl, optionally substituted hydroxyalkenyl, optionally substituted hydroxyalkynyl, optionally substituted aminoalkyl, optionally substituted aminoalkenyl, optionally substituted aminoalkynyl, optionally substituted alkaryl, optionally substituted heterocyclyl, optionally substituted alkheterocyclyl, optionally substituted amino acid, optionally substituted alkoxycarbonylacyl, optionally substituted alkoxycarbonylalkoxy, optionally substituted alkoxycarbonylalkyl, optionally substituted alkoxycarbonylalkenyl, optionally substituted alkoxycarbonylalkynyl, optionally substituted alkoxycarbonylalkoxy, optionally substituted carboxyalkyl (e.g., optionally substituted with hydroxy and/or an O-protecting group), optionally substituted carboxyalkoxy, optionally substituted carboxyaminoalkyl, or optionally substituted carbamoylalkyl,

[0379] wherein the combination of R^{12b} and T^{1′} or the combination of R^{12b} and R^{12c} can join together to form optionally substituted heterocyclyl; and

[0380] R^{12c} is H, halo, optionally substituted alkyl, optionally substituted alkoxy, optionally substituted thioalkoxy, optionally substituted amino, optionally substituted aminoalkyl, optionally substituted aminoalkenyl, or optionally substituted aminoalkynyl.

[0381] Further exemplary modified uracils include those having Formula (b28)-(b31):

[chemical structure]

or a pharmaceutically acceptable salt or stereoisomer thereof, wherein

[0382] each of T¹ and T² is, independently, O (oxo), S (thio), or Se (seleno);

[0383] each R^{Vb′} and R^{Vb″} is, independently, H, halo, optionally substituted amino acid, optionally substituted alkyl, optionally substituted haloalkyl, optionally substituted hydroxyalkyl, optionally substituted hydroxyalkenyl, optionally substituted hydroxyalkynyl, optionally substituted alkenyl, optionally substituted alkynyl, optionally substituted alkoxy, optionally substituted alkenyloxy, optionally substituted alkynyloxy, optionally substituted aminoalkyl (e.g., substituted with an N-protecting group, such as any described herein, e.g., trifluoroacetyl, or sulfoalkyl), optionally substituted aminoalkenyl, optionally substituted aminoalkynyl, optionally substituted acylaminoalkyl (e.g., substituted with an N-protecting group, such as any described herein, e.g., trifluoroacetyl), optionally substituted alkoxycarbonylalkyl, optionally substituted alkoxycarbonylalkenyl, optionally substituted alkoxycarbonylalkynyl, optionally substituted alkoxycarbonylacyl, optionally substituted alkoxycarbonylalkoxy, optionally substituted carboxyalkyl (e.g., optionally substituted with hydroxy and/or an O-protecting group), optionally substituted carboxyalkoxy, optionally substituted carboxyaminoalkyl, or optionally substituted carbamoylalkyl (e.g., optionally substituted with any substituent described herein, such as those selected from (1)-(21) for alkyl) (e.g., R^{Vb′} is optionally substituted alkyl, optionally substituted alkenyl, or optionally substituted aminoalkyl, e.g., substituted with an N-protecting group, such as any described herein, e.g., trifluoroacetyl, or sulfoalkyl);

[0384] R^{12a} is H, optionally substituted alkyl, optionally substituted carboxyaminoalkyl, optionally substituted aminoalkyl (e.g., e.g., substituted with an N-protecting group, such as any described herein, e.g., trifluoroacetyl, or sulfoalkyl), optionally substituted aminoalkenyl, or optionally substituted aminoalkynyl; and

[0385] R^{12b} is H, optionally substituted alkyl, optionally substituted alkenyl, optionally substituted alkynyl, optionally substituted hydroxyalkyl, optionally substituted hydroxyalkenyl, optionally substituted hydroxyalkynyl, optionally substituted aminoalkyl, optionally substituted aminoalkenyl, optionally substituted aminoalkynyl (e.g., e.g., substituted with an N-protecting group, such as any described herein, e.g., trifluoroacetyl, or sulfoalkyl), optionally substituted alkoxycarbonylacyl, optionally substituted alkoxycarbonylalkoxy, optionally substituted alkoxycarbonylalkyl, optionally substituted alkoxycarbonylalkenyl, optionally substituted alkoxycarbonylalkynyl, optionally substituted alkoxycarbonylalkoxy, optionally substituted carboxyalkoxy, optionally substituted carboxyalkyl, or optionally substituted carbamoylalkyl.

[0386] In particular embodiments, T¹ is O (oxo), and T² is S (thio) or Se (seleno). In other embodiments, T¹ is S (thio), and T² is O (oxo) or Se (seleno). In some embodiments, R_{Vb′} is H, optionally substituted alkyl, or optionally substituted alkoxy.

[0387] In other embodiments, each R^{12a} and R^{12b} is, independently, H, optionally substituted alkyl, optionally substituted alkenyl, optionally substituted alkynyl, or optionally substituted hydroxyalkyl. In particular embodiments, R^{12a} is H. In other embodiments, both R^{12a} and R^{12b} are H.

[0388] In some embodiments, each R^{Vb′} of R^{12b} is, independently, optionally substituted aminoalkyl (e.g., substituted with an N-protecting group, such as any described herein, e.g., trifluoroacetyl, or sulfoalkyl), optionally substituted aminoalkenyl, optionally substituted aminoalkynyl, or optionally substituted acylaminoalkyl (e.g., substituted with an N-protecting group, such as any described herein, e.g., trifluoroacetyl). In some embodiments, the amino and/or alkyl of the optionally substituted aminoalkyl is substituted with one or more of optionally substituted alkyl, optionally substituted alkenyl, optionally substituted sulfoalkyl, optionally substituted carboxy (e.g., substituted with an O-protecting group), optionally substituted hydroxy (e.g., substituted with an O-protecting group), optionally substituted carboxyalkyl (e.g., substituted with an O-protecting group), optionally substituted alkoxycarbonylalkyl (e.g., substituted with an O-protecting group), or N-protecting group. In some embodiments, optionally substituted aminoalkyl is substituted with an optionally substituted sulfoalkyl or optionally substituted alkenyl. In particular embodiments, R^{12a} and R^{Vb″} are both H. In particular embodiments, T¹ is O (oxo), and T² is S (thio) or Se (seleno).

[0389] In some embodiments, R^{Vb′} is optionally substituted alkoxycarbonylalkyl or optionally substituted carbamoylalkyl.

[0390] In particular embodiments, the optional substituent for R^{12a}, R^{12b}, R^{12c}, or R^{Va} is a polyethylene glycol group (e.g., —(CH₂)ₛ₂(OCH₂CH₂)ₛ₁(CH₂)ₛ₃OR′, wherein s1 is an integer from 1 to 10 (e.g., from 1 to 6 or from 1 to 4), each of s2 and s3, independently, is an integer from 0 to 10 (e.g., from 0 to 4, from 0 to 6, from 1 to 4, from 1 to 6, or from 1 to 10), and R′ is H or C₁₋₂₀ alkyl); or an amino-polyethylene glycol group (e.g., —NR^{N1}(CH₂)ₛ₂(CH₂CH₂O)ₛ₁(CH₂)ₛ₃NR^{N1}, wherein s1 is an integer from 1 to 10 (e.g., from 1 to 6 or from 1 to 4), each of s2 and s3, independently, is an integer from 0 to 10 (e.g., from 0 to 4, from 0 to 6, from 1 to 4, from 1 to 6, or from 1 to 10), and each R^{N1} is, independently, hydrogen or optionally substituted C₁₋₆ alkyl).

[0391] In some embodiments, B is a modified cytosine. Exemplary modified cytosines include compounds of Formula (b10)-(b14):

[chemical structure]

or a pharmaceutically acceptable salt or stereoisomer thereof, wherein

[0392] each of T^{3′} and T^{3″} is, independently, H, optionally substituted alkyl, optionally substituted alkoxy, or optionally substituted thioalkoxy, or the combination of T^{3′} and T^{3″} join together (e.g., as in T³) to form O (oxo), S (thio), or Se (seleno);

[0393] each V⁴ is, independently, O, S, N(R^{Vc})ₙᵥ, or C(R^{Vc})ₙᵥ, wherein nv is an integer from 0 to 2 and each R^{Vc} is, independently, H, halo, optionally substituted amino acid, optionally substituted alkyl, optionally substituted alkenyl, optionally substituted alkynyl, optionally substituted alkoxy, optionally substituted alkenyloxy, optionally substituted heterocyclyl, optionally substituted alkheterocyclyl, or optionally substituted alkynyloxy (e.g., optionally substituted with any substituent described herein, such as those selected from (1)-(21) for alkyl), wherein the combination of R^{13b} and R^{Vc} can be taken together to form optionally substituted heterocyclyl;

[0394] each V⁵ is, independently, N(R^{Vd})ₙᵥ, or C(R^{Vd})ₙᵥ, wherein nv is an integer from 0 to 2 and each R^{Vd} is, independently, H, halo, optionally substituted amino acid, optionally substituted alkyl, optionally substituted alkenyl, optionally substituted alkynyl, optionally substituted alkoxy, optionally substituted alkenyloxy, optionally substituted heterocyclyl, optionally substituted alkheterocyclyl, or optionally substituted alkynyloxy (e.g., optionally substituted with any substituent described herein, such as those selected from (1)-(21) for alkyl) (e.g., V⁵ is —CH or N);

[0395] each of R^{13a} and R^{13b} is, independently, H, optionally substituted acyl, optionally substituted acyloxyalkyl, optionally substituted alkyl, or optionally substituted alkoxy, wherein the combination of R^{13b} and R¹⁴ can be taken together to form optionally substituted heterocyclyl;

[0396] each R¹⁴ is, independently, H, halo, hydroxy, thiol, optionally substituted acyl, optionally substituted amino acid, optionally substituted alkyl, optionally substituted haloalkyl, optionally substituted alkenyl, optionally substituted alkynyl, optionally substituted hydroxyalkyl (e.g., substituted with an O-protecting group), optionally substituted hydroxyalkenyl, optionally substituted hydroxyalkynyl, optionally substituted alkoxy, optionally substituted alkenyloxy, optionally substituted alkynyloxy, optionally substituted aminoalkoxy, optionally substituted alkoxyalkoxy, optionally substituted acyloxyalkyl, optionally substituted amino (e.g., —NHR, wherein R is H, alkyl, aryl, or phosphoryl), azido, optionally substituted aryl, optionally substituted heterocyclyl, optionally substituted alkheterocyclyl, optionally substituted aminoalkyl, optionally substituted aminoalkenyl, or optionally substituted aminoalkynyl; and

[0397] each of R¹⁵ and R¹⁶ is, independently, H, optionally substituted alkyl, optionally substituted alkenyl, or optionally substituted alkynyl.

[0398] Further exemplary modified cytosines include those having Formula (b32)-(b35):

[chemical structure]

or a pharmaceutically acceptable salt or stereoisomer thereof, wherein

[0399] each of T¹ and T³ is, independently, O (oxo), S (thio), or Se (seleno);

[0400] each of R^{13a} and R^{13b} is, independently, H, optionally substituted acyl, optionally substituted acyloxyalkyl, optionally substituted alkyl, or optionally substituted alkoxy, wherein the combination of R^{13b} and R¹⁴ can be taken together to form optionally substituted heterocyclyl;

[0401] each R¹⁴ is, independently, H, halo, hydroxy, thiol, optionally substituted acyl, optionally substituted amino acid, optionally substituted alkyl, optionally substituted haloalkyl, optionally substituted alkenyl, optionally substituted alkynyl, optionally substituted hydroxyalkyl (e.g., substituted with an O-protecting group), optionally substituted hydroxyalkenyl, optionally substituted hydroxyalkynyl, optionally substituted alkoxy, optionally substituted alkenyloxy, optionally substituted alkynyloxy, optionally substituted aminoalkoxy, optionally substituted alkoxyalkoxy, optionally substituted acyloxyalkyl, optionally substituted amino (e.g., —NHR, wherein R is H, alkyl, aryl, or phosphoryl), azido, optionally substituted aryl, optionally substituted heterocyclyl, optionally substituted alkheterocyclyl, optionally substituted aminoalkyl (e.g., hydroxyalkyl, alkyl, alkenyl, or alkynyl), optionally substituted aminoalkenyl, or optionally substituted aminoalkynyl; and

[0402] each of R¹⁵ and R¹⁶ is, independently, H, optionally substituted alkyl, optionally substituted alkenyl, or optionally substituted alkynyl (e.g., R¹⁵ is H, and R¹⁶ is H or optionally substituted alkyl).

[0403] In some embodiments, R¹⁵ is H, and R¹⁶ is H or optionally substituted alkyl. In particular embodiments, R¹⁴ is H, acyl, or hydroxyalkyl. In some embodiments, R¹⁴ is halo. In some embodiments, both R¹⁴ and R¹⁵ are H. In some embodiments, both R¹⁵ and R¹⁶ are H. In some embodiments, each of R¹⁴ and R¹⁵ and R¹⁶ is H. In further embodiments, each of R^{13a} and R^{13b} is independently, H or optionally substituted alkyl.

[0404] Further non-limiting examples of modified cytosines include compounds of Formula (b36):

[chemical structure]

or a pharmaceutically acceptable salt or stereoisomer thereof, wherein

[0405] each R^{13b} is, independently, H, optionally substituted acyl, optionally substituted acyloxyalkyl, optionally substituted alkyl, or optionally substituted alkoxy, wherein the combination of R^{13b} and R^{14b} can be taken together to form optionally substituted heterocyclyl;

[0406] each R^{14a} and R^{14b} is, independently, H, halo, hydroxy, thiol, optionally substituted acyl, optionally substituted amino acid, optionally substituted alkyl, optionally substituted haloalkyl, optionally substituted alkenyl, optionally substituted alkynyl, optionally substituted hydroxyalkyl (e.g., substituted with an O-protecting group), optionally substituted hydroxyalkenyl, optionally substituted alkoxy, optionally substituted alkenyloxy, optionally substituted alkynyloxy, optionally substituted aminoalkoxy, optionally substituted alkoxyalkoxy, optionally substituted acyloxyalkyl, optionally substituted amino (e.g., —NHR, wherein R is H, alkyl, aryl, phosphoryl, optionally substituted aminoalkyl, or optionally substituted carboxyaminoalkyl), azido, optionally substituted aryl, optionally substituted heterocyclyl, optionally substituted alkheterocyclyl, optionally substituted aminoalkyl, optionally substituted aminoalkenyl, or optionally substituted aminoalkynyl; and

[0407] each of R¹⁵ is, independently, H, optionally substituted alkyl, optionally substituted alkenyl, or optionally substituted alkynyl.

[0408] In particular embodiments, R^{14b} is an optionally substituted amino acid (e.g., optionally substituted lysine). In some embodiments, R^{14a} is H.

[0409] In some embodiments, B is a modified guanine Exemplary modified guanines include compounds of Formula (b15)-(b17):

[chemical structure]

or a pharmaceutically acceptable salt or stereoisomer thereof, wherein

[0410] Each of T^{4′}, T^{4″}, T^{5′}, T^{5″}, T^{6′}, and T^{6″} is independently, H, optionally substituted alkyl, or optionally substituted alkoxy, and wherein the combination of T^{4′} and T^{4″} (e.g., as in T⁴) or the combination of T^{5′} and T^{5″} (e.g., as in T⁵) or the combination of T^{6′} and T^{6″} join together (e.g., as in T⁶) form O (oxo), S (thio), or Se (seleno);

[0411] each of V⁵ and V⁶ is, independently, O, S, N(R^{Vd})ₙᵥ, or C(R^{Vd})ₙᵥ, wherein nv is an integer from 0 to 2 and each R^{Vd} is, independently, H, halo, thiol, optionally substituted amino acid, cyano, amidine, optionally substituted aminoalkyl, optionally substituted aminoalkenyl, optionally substituted aminoalkynyl, optionally substituted alkyl, optionally substituted alkenyl, optionally substituted alkynyl, optionally substituted alkoxy, optionally substituted alkenyloxy, optionally substituted alkynyloxy (e.g., optionally substituted with any substituent described herein, such as those selected from (1)-(21) for alkyl), optionally substituted thioalkoxy, or optionally substituted amino; and

[0412] each of R¹⁷, R¹⁸, R^{19a}, R^{19b}, R²¹, R²², R²³, and R²⁴ is, independently, H, halo, thiol, optionally substituted alkyl, optionally substituted alkenyl, optionally substituted alkynyl, optionally substituted thioalkoxy, optionally substituted amino, or optionally substituted amino acid.

[0413] Exemplary modified guanosines include compounds of Formula (b37)-(b40):

[chemical structure]

or a pharmaceutically acceptable salt or stereoisomer thereof, wherein

[0414] each of T^{4′} is, independently, H, optionally substituted alkyl, or optionally substituted alkoxy, and each T⁴ is, independently, O (oxo), S (thio), or Se (seleno);

[0415] each of R¹⁸, R^{19a}, R^{19b}, and R²¹ is, independently, H, halo, thiol, optionally substituted alkyl, optionally substituted alkenyl, optionally substituted alkynyl, optionally substituted thioalkoxy, optionally substituted amino, or optionally substituted amino acid.

[0416] In some embodiments, R¹⁸ is H or optionally substituted alkyl. In further embodiments, T⁴ is oxo. In some embodiments, each of R^{19a} and R^{19b} is, independently, H or optionally substituted alkyl.

[0417] In some embodiments, B is a modified adenine. Exemplary modified adenines include compounds of Formula (b18)-(b20):

[chemical structure]

or a pharmaceutically acceptable salt or stereoisomer thereof, wherein

[0418] each V⁷ is, independently, O, S, N(R^{Ve})ₙᵥ, or C(R^{Ve})ₙᵥ, wherein nv is an integer from 0 to 2 and each R^{Ve} is, independently, H, halo, optionally substituted amino acid, optionally substituted alkyl, optionally substituted alkenyl, optionally substituted alkynyl, optionally substituted alkoxy, optionally substituted alkenyloxy, or optionally substituted alkynyloxy (e.g., optionally substituted with any substituent described herein, such as those selected from (1)-(21) for alkyl);

[0419] each R²⁵ is, independently, H, halo, thiol, optionally substituted alkyl, optionally substituted alkenyl, optionally substituted alkynyl, optionally substituted thioalkoxy, or optionally substituted amino;

[0420] each of R^{26a} and R^{26b} is, independently, H, optionally substituted acyl, optionally substituted amino acid, optionally substituted carbamoylalkyl, optionally substituted alkyl, optionally substituted alkenyl, optionally substituted alkynyl, optionally substituted hydroxyalkyl, optionally substituted hydroxyalkenyl, optionally substituted hydroxyalkynyl, optionally substituted alkoxy, or polyethylene glycol group (e.g., —(CH₂)ₛ₂(OCH₂CH₂)ₛ₁(CH₂)ₛ₃OR′, wherein s1 is an integer from 1 to 10 (e.g., from 1 to 6 or from 1 to 4), each of s2 and s3, independently, is an integer from 0 to 10 (e.g., from 0 to 4, from 0 to 6, from 1 to 4, from 1 to 6, or from 1 to 10), and R′ is H or C₁₋₂₀ alkyl); or an amino-polyethylene glycol group (e.g., —NR^{N1}(CH₂)ₛ₂(CH₂CH₂O)ₛ₁(CH₂)ₛ₃NR^{N1}, wherein s1 is an integer from 1 to 10 (e.g., from 1 to 6 or from 1 to 4), each of s2 and s3, independently, is an integer from 0 to 10 (e.g., from 0 to 4, from 0 to 6, from 1 to 4, from 1 to 6, or from 1 to 10), and each R^{N1} is, independently, hydrogen or optionally substituted C₁₋₆ alkyl);

[0421] each R²⁷ is, independently, H, optionally substituted alkyl, optionally substituted alkenyl, optionally substituted alkynyl, optionally substituted alkoxy, optionally substituted thioalkoxy, or optionally substituted amino;

[0422] each R²⁸ is, independently, H, optionally substituted alkyl, optionally substituted alkenyl, or optionally substituted alkynyl; and

[0423] each R²⁹ is, independently, H, optionally substituted acyl, optionally substituted amino acid, optionally substituted carbamoylalkyl, optionally substituted alkyl, optionally substituted alkenyl, optionally substituted alkynyl, optionally substituted hydroxyalkyl, optionally substituted hydroxyalkenyl, optionally substituted alkoxy, or optionally substituted amino.

[0424] Exemplary modified adenines include compounds of Formula (b41)-(b43):

[chemical structure]

or a pharmaceutically acceptable salt or stereoisomer thereof, wherein

[0425] each R²⁵ is, independently, H, halo, thiol, optionally substituted alkyl, optionally substituted alkenyl, optionally substituted alkynyl, optionally substituted thioalkoxy, or optionally substituted amino;

[0426] each of R^{26a} and R^{26b} is, independently, H, optionally substituted acyl, optionally substituted amino acid, optionally substituted carbamoylalkyl, optionally substituted alkyl, optionally substituted alkenyl, optionally substituted alkynyl, optionally substituted hydroxyalkyl, optionally substituted hydroxyalkenyl, optionally substituted hydroxyalkynyl, optionally substituted alkoxy, or polyethylene glycol group (e.g., —(CH₂)ₛ₂(OCH₂CH₂)ₛ₁(CH₂)ₛ₃OR′, wherein s1 is an integer from 1 to 10 (e.g., from 1 to 6 or from 1 to 4), each of s2 and s3, independently, is an integer from 0 to 10 (e.g., from 0 to 4, from 0 to 6, from 1 to 4, from 1 to 6, or from 1 to 10), and R′ is H or C₁₋₂₀ alkyl); or an amino-polyethylene glycol group (e.g., —NR^{N1}(CH₂)ₛ₂(CH₂CH₂O)ₛ₁(CH₂)ₛ₃NR^{N1}, wherein s1 is an integer from 1 to 10 (e.g., from 1 to 6 or from 1 to 4), each of s2 and s3, independently, is an integer from 0 to 10 (e.g., from 0 to 4, from 0 to 6, from 1 to 4, from 1 to 6, or from 1 to 10), and each R^{N1} is, independently, hydrogen or optionally substituted C₁₋₆ alkyl); and

[0427] each R²⁷ is, independently, H, optionally substituted alkyl, optionally substituted alkenyl, optionally substituted alkynyl, optionally substituted alkoxy, optionally substituted thioalkoxy, or optionally substituted amino.

[0428] In some embodiments, R^{26a} is H, and R^{26b} is optionally substituted alkyl. In some embodiments, each of R^{26a} and R^{26b} is, independently, optionally substituted alkyl. In particular embodiments, R²⁷ is optionally substituted alkyl, optionally substituted alkoxy, or optionally substituted thioalkoxy. In other embodiments, R²⁵ is optionally substituted alkyl, optionally substituted alkoxy, or optionally substituted thioalkoxy.

[0429] In particular embodiments, the optional substituent for R^{26a}, R^{26b}, or R²⁹ is a polyethylene glycol group (e.g., —(CH₂)ₛ₂(OCH₂CH₂)ₛ₁(CH₂)₂₃OR′, wherein s1 is an integer from 1 to 10 (e.g., from 1 to 6 or from 1 to 4), each of s2 and s3, independently, is an integer from 0 to 10 (e.g., from 0 to 4, from 0 to 6, from 1 to 4, from 1 to 6, or from 1 to 10), and R′ is H or C₁₋₂₀ alkyl); or an amino-polyethylene glycol group (e.g., —NR^{N1}(CH₂)ₛ₂(CH₂CH₂O)ₛ₁(CH₂)ₛ₃NR^{N1}, wherein s1 is an integer from 1 to 10 (e.g., from 1 to 6 or from 1 to 4), each of s2 and s3, independently, is an integer from 0 to 10 (e.g., from 0 to 4, from 0 to 6, from 1 to 4, from 1 to 6, or from 1 to 10), and each R^{N1} is, independently, hydrogen or optionally substituted C₁₋₆ alkyl).

[0430] In some embodiments, B may have Formula (b21):

[chemical structure]

wherein X¹² is, independently, O, S, optionally substituted alkylene (e.g., methylene), or optionally substituted heteroalkylene, xa is an integer from 0 to 3, and R^{12a} and T² are as described herein.

[0431] In some embodiments, B may have Formula (b22):

[chemical structure]

wherein R^{10′} is, independently, optionally substituted alkyl, optionally substituted alkenyl, optionally substituted alkynyl, optionally substituted aryl, optionally substituted heterocyclyl, optionally substituted aminoalkyl, optionally substituted aminoalkenyl, optionally substituted aminoalkynyl, optionally substituted alkoxy, optionally substituted alkoxycarbonylalkyl, optionally substituted alkoxycarbonylalkenyl, optionally substituted alkoxycarbonylalkynyl, optionally substituted alkoxycarbonylalkoxy, optionally substituted carboxyalkoxy, optionally substituted carboxyalkyl, or optionally substituted carbamoylalkyl, and R¹¹, R^{12a}, T¹, and T² are as described herein.

[0432] In some embodiments, B may have Formula (b23):

[chemical structure]

wherein R¹⁰ is optionally substituted heterocyclyl (e.g., optionally substituted furyl, optionally substituted thienyl, or optionally substituted pyrrolyl), optionally substituted aryl (e.g., optionally substituted phenyl or optionally substituted naphthyl), or any substituent described herein (e.g., for R¹⁰); and wherein R¹¹ (e.g., H or any substituent described herein), R^{12a} (e.g., H or any substituent described herein), T¹ (e.g., oxo or any substituent described herein), and T² (e.g., oxo or any substituent described herein) are as described herein.

[0433] In some embodiments, B may have Formula (b24):

[chemical structure]

wherein R^{14′} is, independently, optionally substituted alkyl, optionally substituted alkenyl, optionally substituted alkynyl, optionally substituted aryl, optionally substituted heterocyclyl, optionally substituted alkaryl, optionally substituted alkheterocyclyl, optionally substituted aminoalkyl, optionally substituted aminoalkenyl, optionally substituted aminoalkynyl, optionally substituted alkoxy, optionally substituted alkoxycarbonylalkyl, optionally substituted alkoxycarbonylalkenyl, optionally substituted alkoxycarbonylalkynyl, optionally substituted alkoxycarbonylalkoxy, optionally substituted carboxyalkoxy, optionally substituted carboxyalkyl, or optionally substituted carbamoylalkyl, and R^{13a}, R^{13b}, R¹⁵, and T³ are as described herein.

[0434] In some embodiments, B may have Formula (b25):

[chemical structure]

wherein R^{14′} is optionally substituted heterocyclyl (e.g., optionally substituted furyl, optionally substituted thienyl, or optionally substituted pyrrolyl), optionally substituted aryl (e.g., optionally substituted phenyl or optionally substituted naphthyl), or any substituent described herein (e.g., for R¹⁴ or R^{14′}); and wherein R^{13a} (e.g., H or any substituent described herein), R^{13b} (e.g., H or any substituent described herein), R¹⁵ (e.g., H or any substituent described herein), and T³ (e.g., oxo or any substituent described herein) are as described herein.

[0435] In some embodiments, B is a nucleobase selected from the group consisting of cytosine, guanine, adenine, and uracil. In some embodiments, B may be:

[chemical structure]

[0436] In some embodiments, the modified nucleobase is a modified uracil. Exemplary nucleobases and nucleosides having a modified uracil include pseudouridine (ψ), pyridin-4-one ribonucleoside, 5-aza-uridine, 6-aza-uridine, 2-thio-5-aza-uridine, 2-thiouridine (s²U), 4-thio-uridine (s⁴U), 4-thio-pseudouridine, 2-thio-pseudouridine, 5-hydroxyuridine (ho⁵U), 5-aminoallyl-uridine, 5-halo-uridine (e.g., 5-iodo-uridineor 5-bromo-uridine), 3-methyluridine (m³U), 5-methoxy-uridine (mo⁵U), uridine 5-oxyacetic acid (cmo⁵U), uridine 5-oxyacetic acid methyl ester (mcmo⁵U), 5-carboxymethyl-uridine (cm⁵U), 1-carboxymethyl-pseudouridine, 5-carboxyhydroxymethyl-uridine (chm⁵U), 5-carboxyhydroxymethyl-uridine methyl ester (mchm⁵U), 5-methoxycarbonylmethyl-uridine (mcm⁵U), 5-methoxycarbonylmethyl-2-thio-uridine (mcm⁵s²U), 5-aminomethyl-2-thio-uridine (nm⁵s²U), 5-methylaminomethyl-uridine (mnm⁵U), 5-methylaminomethyl-2-thio-uridine (mnm⁵s²U), 5-methylaminomethyl-2-seleno-uridine (mnm⁵se²U), 5-carbamoylmethyl-uridine (ncm⁵U), 5-carboxymethylaminomethyl-uridine (cmnm⁵U), 5-carboxymethylaminomethyl-2-thio-uridine (cmnm⁵s²U), 5-propynyl-uridine, 1-propynyl-pseudouridine, 5-taurinomethyluridine (τm⁵U), 1-taurinomethyl-pseudouridine, 5-taurinomethyl-2-thio-uridine (τm⁵s²U), 1-taurinomethyl-4-thio-pseudouridine, 5-methyl-uridine (m⁵U, i.e., having the nucleobase deoxythymine), 1-methyl-pseudouridine (m¹ψ), 5-methyl-2-thio-uridine (m⁵s²U), 1-methyl-4-thio-pseudouridine (m¹s⁴ψ)^{,} 4-thio-1-methyl-pseudouridine, 3-methyl-pseudouridine (m³ψ), 2-thio-1-methyl-pseudouridine, 1-methyl-1-deaza-pseudouridine, 2-thio-1-methyl-1-deaza-pseudouridine, dihydrouridine (D), dihydropseudouridine, 5,6-dihydrouridine, 5-methyl-dihydrouridine (m⁵D), 2-thio-dihydrouridine, 2-thio-dihydropseudouridine, 2-methoxyuridine, 2-methoxy-4-thio-uridine, 4-methoxy-pseudouridine, 4-methoxy-2-thio-pseudouridine, N1-methyl-pseudouridine, 3-(3-amino-3-carboxypropyl)uridine (acp³ψ), 1-methyl-3-(3-amino-3-carboxypropyl)pseudouridine (acp³ψ), 5-(isopentenylaminomethyl)uridine (inm⁵U), 5-(isopentenylaminomethyl)-2-thio-uridine (inm⁵s²U), α-thio-uridine, 2′-O-methyl-uridine (Um), 5,2′-O-dimethyl-uridine (m⁵Um), 2′-O-methyl-pseudouridine (ψm), 2-thio-2′-O-methyl-uridine (s²Um), 5-methoxycarbonylmethyl-2′-O-methyl-uridine (mcm⁵Um), 5-carbamoylmethyl-2′-O-methyl-uridine (ncm⁵Um), 5-carboxymethylaminomethyl-2′-O-methyl-uridine (cmnm⁵Um), 3,2′-O-dimethyl-uridine (m³Um), and 5-(isopentenylaminomethyl)-2′-O-methyl-uridine (inm⁵Um), 1-thio-uridine, deoxythymidine, 2′-F-ara-uridine, 2′-F-uridine, 2′-OH-ara-uridine, 5-(2-carbomethoxyvinyl) uridine, and 5-[3-(1-E-propenylamino)uridine.

[0437] In some embodiments, the modified nucleobase is a modified cytosine. Exemplary nucleobases and nucleosides having a modified cytosine include 5-aza-cytidine, 6-aza-cytidine, pseudoisocytidine, 3-methyl-cytidine (m³C), N4-acetyl-cytidine (ac⁴C), 5-formylcytidine (f⁵C), N4-methylcytidine (m⁴C), 5-methyl-cytidine (m⁵C), 5-halo-cytidine (e.g., 5-iodo-cytidine), 5-hydroxymethylcytidine (hm⁵C), 1-methyl-pseudoisocytidine, pyrrolo-cytidine, pyrrolo-pseudoisocytidine, 2-thio-cytidine (s²C), 2-thio-5-methyl-cytidine, 4-thio-pseudoisocytidine, 4-thio-1-methyl-pseudoisocytidine, 4-thio-1-methyl-1-deaza-pseudoisocytidine, 1-methyl-1-deaza-pseudoisocytidine, zebularine, 5-aza-zebularine, 5-methyl-zebularine, 5-aza-2-thio-zebularine, 2-thio-zebularine, 2-methoxy-cytidine, 2-methoxy-5-methyl-cytidine, 4-methoxy-pseudoisocytidine, 4-methoxy-1-methyl-pseudoisocytidine, lysidine (k₂C), α-thio-cytidine, 2′-O-methyl-cytidine (Cm), 5,2′-O-dimethyl-cytidine (m⁵Cm), N4-acetyl-2′-O-methyl-cytidine (ac⁴Cm), N4,2′-O-dimethyl-cytidine (m⁴Cm), 5-formyl-2′-O-methyl-cytidine (f⁵Cm), N4,N4,2′-O-trimethyl-cytidine (m⁴₂Cm), 1-thio-cytidine, 2′-F-ara-cytidine, 2′-F-cytidine, and 2′-OH-ara-cytidine.

[0438] In some embodiments, the modified nucleobase is a modified adenine.

[0439] Exemplary nucleobases and nucleosides having a modified adenine include 2-aminopurine, 2,6-diaminopurine, 2-amino-6-halo-purine (e.g., 2-amino-6-chloro-purine), 6-halo-purine (e.g., 6-chloro-purine), 2-amino-6-methyl-purine, 8-azido-adenosine, 7-deaza-adenine, 7-deaza-8-aza-adenine, 7-deaza-2-amino-purine, 7-deaza-8-aza-2-amino-purine, 7-deaza-2,6-diaminopurine, 7-deaza-8-aza-2,6-diaminopurine, 1-methyladenosine (m¹A), 2-methyl-adenine (m²A), N6-methyladenosine (m⁶A), 2-methylthio-N6-methyladenosine (ms² m⁶A), N6-isopentenyladenosine (i⁶A), 2-methylthio-N6-isopentenyladenosine (ms²i⁶A), N6-(cis-hydroxyisopentenyl)adenosine (io⁶A), 2-methylthio-N6-(cis-hydroxyisopentenyl)adenosine (ms²io⁶A), N6-glycinylcarbamoyladenosine (g⁶A), N6-threonylcarbamoyladenosine (t⁶A), N6-methyl-N6-threonylcarbamoyladenosine (m⁶t⁶A), 2-methylthio-N6-threonyl carbamoyladenosine (ms²g⁶A), N6,N6-dimethyl-adenosine (m⁶₂A), N6-hydroxynorvalylcarbamoyl-adenosine (hn⁶A), 2-methylthio-N6-hydroxynorvalylcarbamoyl-adenosine (ms²hn⁶A), N6-acetyl-adenosine (ac⁶A), 7-methyladenine, 2-methylthio-adenine, 2-methoxy-adenine, α-thio-adenosine, 2′-O-methyladenosine (Am), N6,2′-O-dimethyl-adenosine (m⁶Am), N6,N6,2′-O-trimethyl-adenosine (m⁶₂Am), 1,2′-O-dimethyl-adenosine (m¹Am), 2′-O-ribosyladenosine (phosphate) (Ar(p)), 2-amino-N6-methyl-purine, 1-thio-adenosine, 8-azido-adenosine, 2′-F-ara-adenosine, 2′-F-adenosine, 2′-OH-ara-adenosine, and N6-(19-amino-pentaoxanonadecyl)-adenosine.

[0440] In some embodiments, the modified nucleobase is a modified guanine Exemplary nucleobases and nucleosides having a modified guanine include inosine (I), 1-methyl-inosine (m¹I), wyosine (imG), methylwyosine (mimG), 4-demethyl-wyosine (imG-14), isowyosine (imG2), wybutosine (yW), peroxywybutosine (o₂yW), hydroxywybutosine (OHyW), undermodified hydroxywybutosine (OHyW*), 7-deaza-guanosine, queuosine (Q), epoxyqueuosine (oQ), galactosyl-queuosine (galQ), mannosyl-queuosine (manQ), 7-cyano-7-deaza-guanosine (preQ₀), 7-aminomethyl-7-deaza-guanosine (preQ₁), archaeosine (G⁺), 7-deaza-8-aza-guanosine, 6-thio-guanosine, 6-thio-7-deaza-guanosine, 6-thio-7-deaza-8-aza-guanosine, 7-methylguanosine (m⁷G), 6-thio-7-methyl-guanosine, 7-methyl-inosine, 6-methoxy-guanosine, 1-methylguanosine (m¹G), N2-methyl-guanosine (m²G), N2,N2-dimethyl-guanosine (m²₂G), N2,7-dimethyl-guanosine (m^{2,7}G), N2,N2,7-dimethyl-guanosine (m^{2,2,7}G) 8-oxo-guanosine, 7-methyl-8-oxo-guanosine, 1-methyl-6-thio-guanosine, N2-methyl-6-thio-guanosine, N2,N2-dimethyl-6-thio-guanosine, α-thio-guanosine, 2′-O-methyl-guanosine (Gm), N2-methyl-2′-O-methyl-guanosine (m²Gm), N2,N2-dimethyl-2′-O-methyl-guanosine (m²₂Gm), 1-methyl-2′-O-methyl-guanosine (m¹Gm), N2,7-dimethyl-2′-O-methyl-guanosine (m²′⁷Gm), 2′-O-methyl-inosine (Im), 1,2′-O-dimethyl-inosine (m¹Im), 2′-O-ribosylguanosine (phosphate) (Gr(p)) 1-thio-guanosine, 06-methyl-guanosine, 2′-F-ara-guanosine, and 2′-F-guanosine.

[0441] In specific embodiments, a modified nucleoside is 5′-O-(1-Thiophosphate)-Adenosine, 5′-O-(1-Thiophosphate)-Cytidine, 5′-O-(1-Thiophosphate)-Guanosine, 5′-O-(1-Thiophosphate)-Uridine or 5′-O-(1-Thiophosphate)-Pseudouridine.

[chemical structure]

[0442] The α-thio substituted phosphate moiety is provided to confer stability to RNA and DNA polymers through the unnatural phosphorothioate backbone linkages.

[0443] Phosphorothioate DNA and RNA have increased nuclease resistance and subsequently a longer half-life in a cellular environment. Phosphorothioate linked nucleic acids are expected to also reduce the innate immune response through weaker binding/activation of cellular innate immune molecules.

[0444] The nucleobase of the nucleotide can be independently selected from a purine, a pyrimidine, a purine or pyrimidine analog. For example, the nucleobase can each be independently selected from adenine, cytosine, guanine, uracil, or hypoxanthine. In another embodiment, the nucleobase can also include, for example, naturally-occurring and synthetic derivatives of a base, including pyrazolo[3,4-d]pyrimidines, 5-methylcytosine (5-me-C), 5-hydroxymethyl cytosine, xanthine, hypoxanthine, 2-aminoadenine, 6-methyl and other alkyl derivatives of adenine and guanine, 2-propyl and other alkyl derivatives of adenine and guanine, 2-thiouracil, 2-thiothymine and 2-thiocytosine, 5-propynyl uracil and cytosine, 6-azo uracil, cytosine and thymine, 5-uracil (pseudouracil), 4-thiouracil, 8-halo (e.g., 8-bromo), 8-amino, 8-thiol, 8-thioalkyl, 8-hydroxyl and other 8-substituted adenines and guanines, 5-halo particularly 5-bromo, 5-trifluoromethyl and other 5-substituted uracils and cytosines, 7-methylguanine and 7-methyladenine, 8-azaguanine and 8-azaadenine, deazaguanine, 7-deazaguanine, 3-deazaguanine, deazaadenine, 7-deazaadenine, 3-deazaadenine, pyrazolo[3,4-d]pyrimidine, imidazo[1,5-a]1,3,5 triazinones, 9-deazapurines, imidazo[4,5-d]pyrazines, thiazolo[4,5-d]pyrimidines, pyrazin-2-ones, 1,2,4-triazine, pyridazine; and 1,3,5 triazine. When the nucleotides are depicted using the shorthand A, G, C, T or U, each letter refers to the representative base and/or derivatives thereof, e.g., A includes adenine or adenine analogs, e.g., 7-deaza adenine).

[0445] In some embodiments, the modified nucleotide is a compound of Formula XI:

[chemical structure]

[0446] wherein:

[0447] [symbol] denotes a single or a double bond;

[0448] - - - denotes an optional single bond;

[0449] U is O, S, —NR^{a}—, or —CR^{a}R^{b}— when [symbol] denotes a single bond, or U is —CR^{a}-when [symbol] denotes a double bond;

[0450] Z is H, C₁₋₁₂ alkyl, or C₆₋₂₀ aryl, or Z is absent when [symbol] denotes a double bond; and

[0451] Z can be —CR^{a}R^{b}— and form a bond with A;

[0452] A is H, OH, NHR wherein R=alkyl or aryl or phosphoryl, sulfate, —NH₂, N₃, azido, —SH, N an amino acid, or a peptide comprising 1 to 12 amino acids;

[0453] D is H, OH, NHR wherein R=alkyl or aryl or phosphoryl, —NH₂, —SH, an amino acid, a peptide comprising 1 to 12 amino acids, or a group of Formula XII:

[chemical structure]

[0454] or A and D together with the carbon atoms to which they are attached form a 5-membered ring;
[0455] X is O or S;

[0456] each of Y¹ is independently selected from —OR^{a1}, —NR^{a1}R^{b1}, and —SR^{a1};

[0457] each of Y² and Y³ are independently selected from O, —CR^{a}R^{b}—, NR^{c}, S or a linker comprising one or more atoms selected from the group consisting of C, O, N, and S;

[0458] n is 0, 1, 2, or 3;

[0459] m is 0, 1, 2 or 3;

[0460] B is nucleobase;

[0461] R^{a} and R^{b} are each independently H, C₁₋₁₂ alkyl, C₂₋₁₂ alkenyl, C₂₋₁₂ alkynyl, or C₆₋₂₀ aryl;

[0462] R^{c} is H, C₁₋₁₂ alkyl, C₂₋₁₂ alkenyl, phenyl, benzyl, a polyethylene glycol group, or an amino-polyethylene glycol group;

[0463] R^{a1} and R^{b1} are each independently H or a counterion; and

[0464] —OR^{c1} is OH at a pH of about 1 or —OR^{c1} is O⁻ at physiological pH;

[0465] provided that the ring encompassing the variables A, B, D, U, Z, Y² and Y³ cannot be ribose.

[0466] In some embodiments, B is a nucleobase selected from the group consisting of cytosine, guanine, adenine, and uracil.

[0467] In some embodiments, the nucleobase is a pyrimidine or derivative thereof.

[0468] In some embodiments, the modified nucleotides are a compound of Formula XI-a:

[chemical structure]

[0469] In some embodiments, the modified nucleotides are a compound of Formula XI-b:

[chemical structure]

[0470] In some embodiments, the modified nucleotides are a compound of Formula XI-c1, XI-c2, or XI-c3:

[chemical structure]

[0471] In some embodiments, the modified nucleotides are a compound of Formula XI:

[chemical structure]

[0472] wherein:

[0473] [symbol] denotes a single or a double bond;

[0474] - - - denotes an optional single bond;

[0475] U is O, S, —NR^{a}—, or —CR^{a}R^{b}— when [symbol] denotes a single bond, or U is —CR^{a}-when [symbol] denotes a double bond;

[0476] Z is H, C₁₋₁₂ alkyl, or C₆₋₂₀ aryl, or Z is absent when [symbol] denotes a double bond; and

[0477] Z can be —CR^{a}R^{b}— and form a bond with A;

[0478] A is H, OH, sulfate, —NH₂, —SH, an amino acid, or a peptide comprising 1 to 12 amino acids;

[0479] D is H, OH, —NH₂, —SH, an amino acid, a peptide comprising 1 to 12 amino acids, or a group of Formula XII:

[chemical structure]

[0480] or A and D together with the carbon atoms to which they are attached form a 5-membered ring;

[0481] X is O or S;

[0482] each of Y¹ is independently selected from —OR^{a1}, —NR^{a1}R^{b1}, and —SR^{a1};

[0483] each of Y² and Y³ are independently selected from O, —CR^{a}R^{b}—, NR^{c}, S or a linker comprising one or more atoms selected from the group consisting of C, O, N, and S;

[0484] n is 0, 1, 2, or 3;

[0485] m is 0, 1, 2 or 3;

[0486] B is a nucleobase of Formula XIII:

[chemical structure]

[0487] wherein:

[0488] V is N or positively charged NR^{c};

[0489] R³ is NR^{c}R^{d}, —OR^{a}, or —SR^{a};

[0490] R⁴ is H or can optionally form a bond with Y³;

[0491] R⁵ is H, —NR^{c}R^{d}, or —OR^{a};

[0492] R^{a} and R^{b} are each independently H, C₁₋₁₂ alkyl, C₂₋₁₂ alkenyl, C₂₋₁₂ alkynyl, or C₆₋₂₀ aryl;

[0493] R^{c} is H, C₁₋₁₂ alkyl, C₂₋₁₂ alkenyl, phenyl, benzyl, a polyethylene glycol group, or an amino-polyethylene glycol group;

[0494] R^{a1} and R^{b1} are each independently H or a counterion; and

[0495] —OR^{c1} is OH at a pH of about 1 or —OR^{c1} is O⁻ at physiological pH.

[0496] In some embodiments, B is:

[chemical structure]

[0497] wherein R³ is —OH, —SH, or

[chemical structure]

[0498] In some embodiments, B is:

[chemical structure]

[0499] In some embodiments, B is:

[chemical structure]

[0500] In some embodiments, the modified nucleotides are a compound of Formula I-d:

[chemical structure]

[0501] In some embodiments, the modified nucleotides are a compound selected from the group consisting of:

[chemical structure]

[chemical structure]

[chemical structure]

or a pharmaceutically acceptable salt thereof.

[0502] In some embodiments, the modified nucleotides are a compound selected from the group consisting of:

[chemical structure]

[chemical structure]

or a pharmaceutically acceptable salt thereof.

### Modifications on the Internucleoside Linkage

[0503] The modified nucleotides, which may be incorporated into a nucleic acid or modified RNA molecule, can be modified on the internucleoside linkage (e.g., phosphate backbone). Herein, in the context of the polynucleotides, primary constructs, nucleic acids or modified RNA backbone, the phrases “phosphate” and “phosphodiester” are used interchangeably. Backbone phosphate groups can be modified by replacing one or more of the oxygen atoms with a different substituent. Further, the modified nucleosides and nucleotides can include the wholesale replacement of an unmodified phosphate moiety with another internucleoside linkage as described herein. Examples of modified phosphate groups include, but are not limited to, phosphorothioate, phosphoroselenates, boranophosphates, boranophosphate esters, hydrogen phosphonates, phosphoramidates, phosphorodiamidates, alkyl or aryl phosphonates, and phosphotriesters. Phosphorodithioates have both non-linking oxygens replaced by sulfur. The phosphate linker can also be modified by the replacement of a linking oxygen with nitrogen (bridged phosphoramidates), sulfur (bridged phosphorothioates), and carbon (bridged methylene-phosphonates).

[0504] The α-thio substituted phosphate moiety is provided to confer stability to RNA and DNA polymers through the unnatural phosphorothioate backbone linkages. Phosphorothioate DNA and RNA have increased nuclease resistance and subsequently a longer half-life in a cellular environment. While not wishing to be bound by theory, phosphorothioate linked polynucleotides, primary constructs, nucleic acids or modified RNA molecules are expected to also reduce the innate immune response through weaker binding/activation of cellular innate immune molecules.

[0505] In specific embodiments, a modified nucleoside includes an alphα-thio-nucleoside (e.g., 5′-O-(1-thiophosphate)-adenosine, 5′-O-(1-thiophosphate)-cytidine (α-thio-cytidine), 5′-O-(1-thiophosphate)-guanosine, 5′-O-(1-thiophosphate)-uridine, or 5′-O-(1-thiophosphate)-pseudouridine).

[0506] Other internucleoside linkages that may be employed according to the present invention, including internucleoside linkages which do not contain a phosphorous atom, are described herein below.

### Combinations of Modified Sugars, Nucleobases, and Internucleoside Linkages

[0507] The nucleic acids or modified RNA of the invention can include a combination of modifications to the sugar, the nucleobase, and/or the internucleoside linkage. These combinations can include any one or more modifications described herein. For examples, any of the nucleotides described herein in Formulas (Ia), (Ia-1)-(Ia-3), (Ib)-(If), (IIa)-(IIp), (IIb-1), (IIb-2), (IIc-1)-(IIc-2), (IIn-1), (IIn-2), (IVa)-(IVl), and (IXa)-(IXr) can be combined with any of the nucleobases described herein (e.g., in Formulas (b1)-(b43) or any other described herein).

### Synthesis of Nucleic Acids or Modified RNA Molecules (Modified RNAs)

[0508] Nucleic acids for use in accordance with the invention may be prepared according to any useful technique as described herein or any available technique including, but not limited to chemical synthesis, enzymatic synthesis, which is generally termed in vitro transcription, enzymatic or chemical cleavage of a longer precursor, etc. Methods of synthesizing RNAs are known in the art (see, e.g., Gait, M. J. (ed.) Oligonucleotide synthesis: a practical approach, Oxford [Oxfordshire], Washington, D.C.: IRL Press, 1984; and Herdewijn, P. (ed.) Oligonucleotide synthesis: methods and applications, Methods in Molecular Biology, v. 288 (Clifton, N.J.) Totowa, N.J.: Humana Press, 2005; both of which are incorporated herein by reference).

[0509] The modified nucleosides and nucleotides used in the synthesis of modified RNAs disclosed herein can be prepared from readily available starting materials using the following general methods and procedures. It is understood that where typical or preferred process conditions (i.e., reaction temperatures, times, mole ratios of reactants, solvents, pressures, etc.) are given; other process conditions can also be used unless otherwise stated. Optimum reaction conditions may vary with the particular reactants or solvent used, but such conditions can be determined by one skilled in the art by routine optimization procedures.

[0510] The processes described herein can be monitored according to any suitable method known in the art. For example, product formation can be monitored by spectroscopic means, such as nuclear magnetic resonance spectroscopy (e.g., ¹H or ¹³C) infrared spectroscopy, spectrophotometry (e.g., UV-visible), or mass spectrometry, or by chromatography such as high performance liquid chromatography (HPLC) or thin layer chromatography.

[0511] Preparation of modified nucleosides and nucleotides used in the manufacture or synthesis of modified RNAs of the present inventin can involve the protection and deprotection of various chemical groups. The need for protection and deprotection, and the selection of appropriate protecting groups can be readily determined by one skilled in the art.

[0512] The chemistry of protecting groups can be found, for example, in Greene, et al., Protective Groups in Organic Synthesis, 2d. Ed., Wiley & Sons, 1991, which is incorporated herein by reference in its entirety.

[0513] The reactions of the processes described herein can be carried out in suitable solvents, which can be readily selected by one of skill in the art of organic synthesis. Suitable solvents can be substantially nonreactive with the starting materials (reactants), the intermediates, or products at the temperatures at which the reactions are carried out, i.e., temperatures which can range from the solvent's freezing temperature to the solvent's boiling temperature. A given reaction can be carried out in one solvent or a mixture of more than one solvent. Depending on the particular reaction step, suitable solvents for a particular reaction step can be selected.

[0514] Resolution of racemic mixtures of modified nucleosides and nucleotides can be carried out by any of numerous methods known in the art. An example method includes fractional recrystallization using a “chiral resolving acid” which is an optically active, salt-forming organic acid. Suitable resolving agents for fractional recrystallization methods are, for example, optically active acids, such as the D and L forms of tartaric acid, diacetyltartaric acid, dibenzoyltartaric acid, mandelic acid, malic acid, lactic acid or the various optically active camphorsulfonic acids. Resolution of racemic mixtures can also be carried out by elution on a column packed with an optically active resolving agent (e.g., dinitrobenzoylphenylglycine). Suitable elution solvent composition can be determined by one skilled in the art.

[0515] Modified nucleosides and nucleotides (e.g., building block molecules) can be prepared according to the synthetic methods described in Ogata et al., J. Org. Chem. 74:2585-2588 (2009); Purmal et al., Nucl. Acids Res. 22(1): 72-78, (1994); Fukuhara et al., Biochemistry, 1(4): 563-568 (1962); and Xu et al., Tetrahedron, 48(9): 1729-1740 (1992), each of which are incorporated by reference in their entirety.

[0516] Modified nucleosides and nucleotides (e.g., building block molecules) can be prepared according to the synthetic methods described in Ogata et al., J. Org. Chem. 74:2585-2588 (2009); Purmal et al., Nucl. Acids Res. 22(1): 72-78, (1994); Fukuhara et al., Biochemistry, 1(4): 563-568 (1962); and Xu et al., Tetrahedron, 48(9): 1729-1740 (1992), each of which are incorporated by reference in their entirety.

[0517] The modified nucleic acids of the invention may or may not be uniformly modified along the entire length of the molecule. Different nucleotide modifications and/or backbone structures may exist at various positions in the nucleic acid. One of ordinary skill in the art will appreciate that the nucleotide analogs or other modification(s) may be located at any position(s) of a nucleic acid such that the function of the nucleic acid is not substantially decreased. A modification may also be a 5′ or 3′ terminal modification. The nucleic acids may contain at a minimum one and at maximum 100% modified nucleotides, or any intervening percentage, such as at least 50% modified nucleotides, at least 80% modified nucleotides, or at least 90% modified nucleotides. For example, one or more or all types of nucleotide (e.g., purine or pyrimidine, or any one or more or all of A, G, U, C) may or may not be uniformly modified in a nucleic acids or modified RNA of the invention, or in a given predetermined sequence region thereof. In some embodiments, all nucleotides X in a nucleic acids or modified RNA of the invention (or in a given sequence region thereof) are modified, wherein X may any one of nucleotides A, G, U, C, or any one of the combinations A+G, A+U, A+C, G+U, G+C, U+C, A+G+U, A+G+C, G+U+C or A+G+C.

[0518] Different sugar modifications, nucleotide modifications, and/or internucleoside linkages (e.g., backbone structures) may exist at various positions in the nucleic acids or modified RNA. One of ordinary skill in the art will appreciate that the nucleotide analogs or other modification(s) may be located at any position(s) of a nucleic acid or modified RNA such that the function of the nucleic acids or modified RNA is not substantially decreased. A modification may also be a 5′ or 3′ terminal modification. The nucleic acids or modified RNA may contain from about 1% to about 100% modified nucleotides (either in relation to overall nucleotide content, or in relation to one or more types of nucleotide, i.e. any one or more of A, G, U or C) or any intervening percentage (e.g., from 1% to 20%, from 1% to 25%, from 1% to 50%, from 1% to 60%, from 1% to 70%, from 1% to 80%, from 1% to 90%, from 1% to 95%, from 10% to 20%, from 10% to 25%, from 10% to 50%, from 10% to 60%, from 10% to 70%, from 10% to 80%, from 10% to 90%, from 10% to 95%, from 10% to 100%, from 20% to 25%, from 20% to 50%, from 20% to 60%, from 20% to 70%, from 20% to 80%, from 20% to 90%, from 20% to 95%, from 20% to 100%, from 50% to 60%, from 50% to 70%, from 50% to 80%, from 50% to 90%, from 50% to 95%, from 50% to 100%, from 70% to 80%, from 70% to 90%, from 70% to 95%, from 70% to 100%, from 80% to 90%, from 80% to 95%, from 80% to 100%, from 90% to 95%, from 90% to 100%, and from 95% to 100%).

[0519] In some embodiments, the nucleic acids or modified RNA includes a modified pyrimidine (e.g., a modified uracil/uridine/U or modified cytosine/cytidine/C). In some embodiments, the uracil or uridine (generally: U) in the nucleic acids or modified RNA molecule may be replaced with from about 1% to about 100% of a modified uracil or modified uridine (e.g., from 1% to 20%, from 1% to 25%, from 1% to 50%, from 1% to 60%, from 1% to 70%, from 1% to 80%, from 1% to 90%, from 1% to 95%, from 10% to 20%, from 10% to 25%, from 10% to 50%, from 10% to 60%, from 10% to 70%, from 10% to 80%, from 10% to 90%, from 10% to 95%, from 10% to 100%, from 20% to 25%, from 20% to 50%, from 20% to 60%, from 20% to 70%, from 20% to 80%, from 20% to 90%, from 20% to 95%, from 20% to 100%, from 50% to 60%, from 50% to 70%, from 50% to 80%, from 50% to 90%, from 50% to 95%, from 50% to 100%, from 70% to 80%, from 70% to 90%, from 70% to 95%, from 70% to 100%, from 80% to 90%, from 80% to 95%, from 80% to 100%, from 90% to 95%, from 90% to 100%, and from 95% to 100% of a modified uracil or modified uridine). The modified uracil or uridine can be replaced by a compound having a single unique structure or by a plurality of compounds having different structures (e.g., 2, 3, 4 or more unique structures, as described herein). In some embodiments, the cytosine or cytidine (generally: C) in the nucleic acid or modified RNA molecule may be replaced with from about 1% to about 100% of a modified cytosine or modified cytidine (e.g., from 1% to 20%, from 1% to 25%, from 1% to 50%, from 1% to 60%, from 1% to 70%, from 1% to 80%, from 1% to 90%, from 1% to 95%, from 10% to 20%, from 10% to 25%, from 10% to 50%, from 10% to 60%, from 10% to 70%, from 10% to 80%, from 10% to 90%, from 10% to 95%, from 10% to 100%, from 20% to 25%, from 20% to 50%, from 20% to 60%, from 20% to 70%, from 20% to 80%, from 20% to 90%, from 20% to 95%, from 20% to 100%, from 50% to 60%, from 50% to 70%, from 50% to 80%, from 50% to 90%, from 50% to 95%, from 50% to 100%, from 70% to 80%, from 70% to 90%, from 70% to 95%, from 70% to 100%, from 80% to 90%, from 80% to 95%, from 80% to 100%, from 90% to 95%, from 90% to 100%, and from 95% to 100% of a modified cytosine or modified cytidine). The modified cytosine or cytidine can be replaced by a compound having a single unique structure or by a plurality of compounds having different structures (e.g., 2, 3, 4 or more unique structures, as described herein).

[0520] In some embodiments, the present disclosure provides methods of synthesizing a nucleic acids or modified RNA (e.g., the first region, first flanking region, or second flanking region) including n number of linked nucleosides having Formula (Ia-1):

[chemical structure]

comprising:

[0521] a) reacting a nucleotide of Formula (IV-1):

[chemical structure]

[0522] with a phosphoramidite compound of Formula (V-1):

[chemical structure]

[0523] wherein Y⁹ is H, hydroxy, phosphoryl, pyrophosphate, sulfate, amino, thiol, optionally substituted amino acid, or a peptide (e.g., including from 2 to 12 amino acids); and each P¹, P², and P³ is, independently, a suitable protecting group; and [symbol] denotes a solid support;

[0524] to provide a nucleic acids or modified RNA of Formula (VI-1):

[chemical structure]

and

[0525] b) oxidizing or sulfurizing the nucleic acids or modified RNA of Formula (V) to yield a nucleic acid or modified RNA of Formula (VII-1):

[chemical structure]

and

[0526] c) removing the protecting groups to yield the nucleic acids or modified RNA of Formula (Ia).

[0527] In some embodiments, steps a) and b) are repeated from 1 to about 10,000 times. In some embodiments, the methods further comprise a nucleotide selected from the group consisting of A, C, G and U adenosine, cytosine, guanosine, and uracil. In some embodiments, the nucleobase may be a pyrimidine or derivative thereof. In some embodiments, the nucleic acid is translatable.

[0528] Other components of the nucleic acid are optional, and are beneficial in some embodiments. For example, a 5′ untranslated region (UTR) and/or a 3′UTR are provided, wherein either or both may independently contain one or more different nucleotide modifications. In such embodiments, nucleotide modifications may also be present in the translatable region. Also provided are nucleic acids containing a Kozak sequence.

[0529] Additionally, provided are nucleic acids containing one or more intronic nucleotide sequences capable of being excised from the nucleic acid.

### Combinations of Nucleotides

[0530] Further examples of modified nucleotides and modified nucleotide combinations are provided below in Table 9. These combinations of modified nucleotides can be used to form the nucleic acids or modified RNA of the invention. Unless otherwise noted, the modified nucleotides may be completely substituted for the natural nucleotides of the nucleic acids or modified RNA of the invention. As a non-limiting example, the natural nucleotide uridine may be substituted with a modified nucleoside described herein. In another non-limiting example, the natural nucleotide uridine may be partially substituted (e.g., about 0.1%, 1%, 5%, 10%, 15%, 20%, 25%, 30%, 35%, 40%, 45%, 50%, 55%, 60%, 65%, 70%, 75%, 80%, 85%, 90%, 95% or 99.9%) with at least one of the modified nucleoside disclosed herein.

TABLE 9

| Modified Nucleotide | Modified Nucleotide Combination |
|---|---|
| 6-aza-cytidine | α-thio-cytidine/5-iodo-uridine |
| 2-thio-cytidine | α-thio-cytidine/N1-methyl-pseudo-uridine |
| α-thio-cytidine | α-thio-cytidine/α-thio-uridine |
| Pseudo-iso-cytidine | α-thio-cytidine/5-methyl-uridine |
| 5-aminoallyl-uridine | α-thio-cytidine/pseudo-uridine |
| 5-iodo-uridine | Pseudo-iso-cytidine/5-iodo-uridine |
| N1-methyl-pseudouridine | Pseudo-iso-cytidine/N1-methyl-pseudo-uridine |
| 5,6-dihydrouridine | Pseudo-iso-cytidine/α-thio-uridine |
| α-thio-uridine | Pseudo-iso-cytidine/5-methyl-uridine |
| 4-thio-uridine | Pseudo-iso-cytidine/Pseudo-uridine |
| 6-aza-uridine | Pyrrolo-cytidine/5-iodo-uridine |
| 5-hydroxy-uridine | Pyrrolo-cytidine/N1-methyl-pseudo-uridine |
| Deoxy-thymidine | Pyrrolo-cytidine/α-thio-uridine |
| Pseudo-uridine | Pyrrolo-cytidine/5-methyl-uridine |
| Inosine | Pyrrolo-cytidine/Pseudo-uridine |
| α-thio-guanosine | 5-methyl-cytidine/5-iodo-uridine |
| 8-oxo-guanosine | 5-methyl-cytidine/N1-methyl-pseudo-uridine |
| O6-methyl-guanosine | 5-methyl-cytidine/α-thio-uridine |
| 7-deaza-guanosine | 5-methyl-cytidine/5-methyl-uridine |
| No modification | 5-methyl-cytidine/Pseudo-uridine |
| N1-methyl-adenosine | about 25% of cytosines are Pseudo-iso-cytidine |
| 2-amino-6-Chloro-purine | about 25% of uridines are N1-methyl-pseudo-uridine |
| N6-methyl-2-amino-purine | 25% N1-Methyl-pseudo-uridine/75%-pseudo-uridine |
| 6-Chloro-purine | about 50% of the cytosines are pyrrolo-cytidine |
| N6-methyl-adenosine | 5-methyl-cytidine/5-iodo-uridine |
| α-thio-adenosine | 5-methyl-cytidine/N1-methyl-pseudouridine |
| 8-azido-adenosine | 5-methyl-cytidine/α-thio-uridine |
| 7-deaza-adenosine | 5-methyl-cytidine/5-methyl-uridine |
| Pyrrolo-cytidine | 5-methyl-cytidine/pseudouridine |
| 5-methyl-cytidine | about 25% of cytosines are 5-methyl-cytidine |
| N4-acetyl-cytidine | about 50% of cytosines are 5-methyl-cytidine |
| 5-methyl-uridine | 5-methyl-cytidine/5-methoxy-uridine |
| 5-iodo-cytidine | 5-methyl-cytidine/5-bromo-uridine |
| | 5-methyl-cytidine/2-thio-uridine |
| | 5-methyl-cytidine/about 50% of uridines are 2-thio-uridine |
| | about 50% of uridines are 5-methyl-cytidine/about 50% |
| | of uridines are 2-thio-uridine |
| | N4-acetyl-cytidine/5-iodo-uridine |
| | N4-acetyl-cytidine/N1-methyl-pseudouridine |
| | N4-acetyl-cytidine/α-thio-uridine |
| | N4-acetyl-cytidine/5-methyl-uridine |
| | N4-acetyl-cytidine/pseudouridine |
| | about 50% of cytosines are N4-acetyl-cytidine |
| | about 25% of cytosines are N4-acetyl-cytidine |
| | N4-acetyl-cytidine/5-methoxy-uridine |
| | N4-acetyl-cytidine/5-bromo-uridine |
| | N4-acetyl-cytidine/2-thio-uridine |
| | about 50% of cytosines are N4-acetyl-cytidine/about 50% |
| | of uridines are 2-thio-uridine |
| | pseudoisocytidine/about 50% of uridines are N1-methyl- |
| | pseudouridine and about 50% of uridines are pseudouridine |
| | pseudoisocytidine/about 25% of uridines are N1-methyl- |
| | pseudouridine and about 25% of uridines are pseudouridine |
| | (e.g., 25% N1-methyl-pseudouridine/75% pseudouridine) |
| | about 50% of the cytosines are α-thio-cytidine |

[0531] Certain modified nucleotides and nucleotide combinations have been explored by the current inventors. These findings are described in U.S. Provisional Application No. 61/404,413, filed on Oct. 1, 2010, entitled Engineered Nucleic Acids and Methods of Use Thereof, U.S. patent application Ser. No. 13/251,840, filed on Oct. 3, 2011, entitled Modified Nucleotides, and Nucleic Acids, and Uses Thereof, now abandoned, U.S. patent application Ser. No. 13/481,127, filed on May 25, 2012, entitled Modified Nucleotides, and Nucleic Acids, and Uses Thereof, International Patent Publication No WO2012045075, filed on Oct. 3, 2011, entitled Modified Nucleosides, Nucleotides, And Nucleic Acids, and Uses Thereof, U.S. Patent Publication No US20120237975 filed on Oct. 3, 2011, entitled Engineered Nucleic Acids and Method of Use Thereof, and International Patent Publication No WO2012045082, which are incorporated by reference in their entireties.

[0532] Further examples of modified nucleotide combinations are provided below in Table 10. These combinations of modified nucleotides can be used to form the nucleic acids of the invention.

TABLE 10

| Modified Nucleotide | Modified Nucleotide Combination |
|---|---|
| modified cytidine having one or more | modified cytidine with (b10)/pseudouridine |
| nucleobases of Formula (b10) | modified cytidine with (b10)/N1-methyl-pseudouridine |
| | modified cytidine with (b10)/5-methoxy-uridine |
| | modified cytidine with (b10)/5-methyl-uridine |
| | modified cytidine with (b10)/5-bromo-uridine |
| | modified cytidine with (b10)/2-thio-uridine |
| | about 50% of cytidine substituted with modified cytidine |
| | (b10)/about 50% of uridines are 2-thio-uridine |
| modified cytidine having one or more | modified cytidine with (b32)/pseudouridine |
| nucleobases of Formula (b32) | modified cytidine with (b32)/N1-methyl-pseudouridine |
| | modified cytidine with (b32)/5-methoxy-uridine |
| | modified cytidine with (b32)/5-methyl-uridine |
| | modified cytidine with (b32)/5-bromo-uridine |
| | modified cytidine with (b32)/2-thio-uridine |
| | about 50% of cytidine substituted with modified cytidine |
| | (b32)/about 50% of uridines are 2-thio-uridine |
| modified uridine having one or more | modified uridine with (b1)/N4-acetyl-cytidine |
| nucleobases of Formula (b1) | modified uridine with (b1)/5-methyl-cytidine |
| modified uridine having one or more | modified uridine with (b8)/N4-acetyl-cytidine |
| nucleobases of Formula (b8) | modified uridine with (b8)/5-methyl-cytidine |
| modified uridine having one or more | modified uridine with (b28)/N4-acetyl-cytidine |
| nucleobases of Formula (b28) | modified uridine with (b28)/5-methyl-cytidine |
| modified uridine having one or more | modified uridine with (b29)/N4-acetyl-cytidine |
| nucleobases of Formula (b29) | modified uridine with (b29)/5-methyl-cytidine |
| modified uridine having one or more | modified uridine with (b30)/N4-acetyl-cytidine |
| nucleobases of Formula (b30) | modified uridine with (b30)/5-methyl-cytidine |

[0533] In some embodiments, at least 25% of the cytosines are replaced by a compound of Formula (b10)-(b14), (b24), (b25), or (b32)-(b35) (e.g., at least about 30%, at least about 35%, at least about 40%, at least about 45%, at least about 50%, at least about 55%, at least about 60%, at least about 65%, at least about 70%, at least about 75%, at least about 80%, at least about 85%, at least about 90%, at least about 95%, or about 100% of, e.g., a compound of Formula (b10) or (b32)).

[0534] In some embodiments, at least 25% of the uracils are replaced by a compound of Formula (b1)-(b9), (b21)-(b23), or (b28)-(b31) (e.g., at least about 30%, at least about 35%, at least about 40%, at least about 45%, at least about 50%, at least about 55%, at least about 60%, at least about 65%, at least about 70%, at least about 75%, at least about 80%, at least about 85%, at least about 90%, at least about 95%, or about 100% of, e.g., a compound of Formula (b1), (b8), (b28), (b29), or (b30)).

[0535] In some embodiments, at least 25% of the cytosines are replaced by a compound of Formula (b10)-(b14), (b24), (b25), or (b32)-(b35) (e.g. Formula (b10) or (b32)), and at least 25% of the uracils are replaced by a compound of Formula (b1)-(b9), (b21)-(b23), or (b28)-(b31) (e.g. Formula (b1), (b8), (b28), (b29), or (b30)) (e.g., at least about 30%, at least about 35%, at least about 40%, at least about 45%, at least about 50%, at least about 55%, at least about 60%, at least about 65%, at least about 70%, at least about 75%, at least about 80%, at least about 85%, at least about 90%, at least about 95%, or about 100%).

### Modifications Including Linker and a Payload

[0536] The nucleobase of the nucleotide can be covalently linked at any chemically appropriate position to a payload, e.g., detectable agent or therapeutic agent. For example, the nucleobase can be deaza-adenosine or deaza-guanosine and the linker can be attached at the C-7 or C-8 positions of the deaza-adenosine or deaza-guanosine. In other embodiments, the nucleobase can be cytosine or uracil and the linker can be attached to the N-3 or C-5 positions of cytosine or uracil. Scheme 1 below depicts an exemplary modified nucleotide wherein the nucleobase, adenine, is attached to a linker at the C-7 carbon of 7-deaza adenine. In addition, Scheme 1 depicts the modified nucleotide with the linker and payload, e.g., a detectable agent, incorporated onto the 3′ end of the mRNA. Disulfide cleavage and 1,2-addition of the thiol group onto the propargyl ester releases the detectable agent. The remaining structure (depicted, for example, as pApC5Parg in Scheme 1) is the inhibitor. The rationale for the structure of the modified nucleotides is that the tethered inhibitor sterically interferes with the ability of the polymerase to incorporate a second base. Thus, it is critical that the tether be long enough to affect this function and that the inhibitor be in a stereochemical orientation that inhibits or prohibits second and follow on nucleotides into the growing nucleic acid or modified RNA strand.

[chemical structure]

[chemical structure]

### Linker

[0537] The term “linker” as used herein refers to a group of atoms, e.g., 10-1,000 atoms, and can be comprised of the atoms or groups such as, but not limited to, carbon, amino, alkylamino, oxygen, sulfur, sulfoxide, sulfonyl, carbonyl, and imine. The linker can be attached to a modified nucleoside or nucleotide on the nucleobase or sugar moiety at a first end, and to a payload, e.g., detectable or therapeutic agent, at a second end. The linker is of sufficient length as to not interfere with incorporation into a nucleic acid sequence.

[0538] Examples of chemical groups that can be incorporated into the linker include, but are not limited to, an alkyl, alkene, an alkyne, an amido, an ether, a thioether, an or an ester group. The linker chain can also comprise part of a saturated, unsaturated or aromatic ring, including polycyclic and heteroaromatic rings wherein the heteroaromatic ring is an aryl group containing from one to four heteroatoms, N, O or S. Specific examples of linkers include, but are not limited to, unsaturated alkanes, polyethylene glycols, and dextran polymers.

[0539] For example, the linker can include ethylene or propylene glycol monomeric units, e.g., diethylene glycol, dipropylene glycol, triethylene glycol, tripropylene glycol, tetraethylene glycol, or tetraethylene glycol. In some embodiments, the linker can include a divalent alkyl, alkenyl, and/or alkynyl moiety. The linker can include an ester, amide, or ether moiety.

[0540] Other examples include cleavable moieties within the linker, such as, for example, a disulfide bond (—S—S—) or an azo bond (—N═N—), which can be cleaved using a reducing agent or photolysis. A cleavable bond incorporated into the linker and attached to a modified nucleotide, when cleaved, results in, for example, a short “scar” or chemical modification on the nucleotide. For example, after cleaving, the resulting scar on a nucleotide base, which formed part of the modified nucleotide, and is incorporated into a nucleic acid or modified RNA strand, is unreactive and does not need to be chemically neutralized. This increases the ease with which a subsequent nucleotide can be incorporated during sequencing of a nucleic acid polymer template. For example, conditions include the use of tris(2-carboxyethyl)phosphine (TCEP), dithiothreitol (DTT) and/or other reducing agents for cleavage of a disulfide bond. A selectively severable bond that includes an amido bond can be cleaved for example by the use of TCEP or other reducing agents, and/or photolysis. A selectively severable bond that includes an ester bond can be cleaved for example by acidic or basic hydrolysis.

### Payload

[0541] The methods and compositions described herein are useful for delivering a payload to a biological target. The payload can be used, e.g., for labeling (e.g., a detectable agent such as a fluorophore), or for therapeutic purposes (e.g., a cytotoxin or other therapeutic agent).

### Payload: Therapeutic Agents

[0542] In some embodiments the payload is a therapeutic agent such as a cytotoxin, radioactive ion, chemotherapeutic, or other therapeutic agent. A cytotoxin or cytotoxic agent includes any agent that is detrimental to cells. Examples include taxol, cytochalasin B, gramicidin D, ethidium bromide, emetine, mitomycin, etoposide, tenoposide, vincristine, vinblastine, colchicin, doxorubicin, daunorubicin, dihydroxy anthracin dione, mitoxantrone, mithramycin, actinomycin D, 1-dehydrotestosterone, glucocorticoids, procaine, tetracaine, lidocaine, propranolol, puromycin, maytansinoids, e.g., maytansinol (see U.S. Pat. No. 5,208,020), CC-1065 (see U.S. Pat. Nos. 5,475,092, 5,585,499, 5,846,545) and analogs or homologs thereof. Radioactive ions include, but are not limited to iodine (e.g., iodine 125 or iodine 131), strontium 89, phosphorous, palladium, cesium, iridium, phosphate, cobalt, yttrium 90, Samarium 153 and praseodymium. Other therapeutic agents include, but are not limited to, antimetabolites (e.g., methotrexate, 6-mercaptopurine, 6-thioguanine, cytarabine, 5-fluorouracil decarbazine), alkylating agents (e.g., mechlorethamine, thioepa chlorambucil, CC-1065, melphalan, carmustine (BSNU) and lomustine (CCNU), cyclothosphamide, busulfan, dibromomannitol, streptozotocin, mitomycin C, and cis-dichlorodiamine platinum (II) (DDP) cisplatin), anthracyclines (e.g., daunorubicin (formerly daunomycin) and doxorubicin), antibiotics (e.g., dactinomycin (formerly actinomycin), bleomycin, mithramycin, and anthramycin (AMC)), and anti-mitotic agents (e.g., vincristine, vinblastine, taxol and maytansinoids).

### Payload: Detectable Agents

[0543] Examples of detectable substances include various organic small molecules, inorganic compounds, nanoparticles, enzymes or enzyme substrates, fluorescent materials, luminescent materials, bioluminescent materials, chemiluminescent materials, radioactive materials, and contrast agents. Such optically-detectable labels include for example, without limitation, 4-acetamido-4′-isothiocyanatostilbene-2,2′disulfonic acid; acridine and derivatives: acridine, acridine isothiocyanate; 5-(2′-aminoethyl)aminonaphthalene-1-sulfonic acid (EDANS); 4-amino-N-[3-vinylsulfonyl)phenyl]naphthalimide-3,5 disulfonate; N-(4-anilino-1-naphthyl)maleimide; anthranilamide; BODIPY; Brilliant Yellow; coumarin and derivatives; coumarin, 7-amino-4-methylcoumarin (AMC, Coumarin 120), 7-amino-4-trifluoromethylcouluarin (Coumaran 151); cyanine dyes; cyanosine; 4′,6-diaminidino-2-phenylindole (DAPI); 5′ 5″-dibromopyrogallol-sulfonaphthalein (Bromopyrogallol Red); 7-diethylamino-3-(4′-isothiocyanatophenyl)-4-methylcoumarin; diethylenetriamine pentaacetate; 4,4′-diisothiocyanatodihydro-stilbene-2,2′-disulfonic acid; 4,4′-diisothiocyanatostilbene-2,2′-disulfonic acid; 5-[dimethylamino]-naphthalene-1-sulfonyl chloride (DNS, dansylchloride); 4-dimethylaminophenylazophenyl-4′-isothiocyanate (DABITC); eosin and derivatives; eosin, eosin isothiocyanate, erythrosin and derivatives; erythrosin B, erythrosin, isothiocyanate; ethidium; fluorescein and derivatives; 5-carboxyfluorescein (FAM), 5-(4,6-dichlorotriazin-2-yl)aminofluorescein (DTAF), 2′,7′-dimethoxy-4′5′-dichloro-6-carboxyfluorescein, fluorescein, fluorescein isothiocyanate, QFITC, (XRITC); fluorescamine; IR144; IR1446; Malachite Green isothiocyanate; 4-methylumbelliferoneortho cresolphthalein; nitrotyrosine; pararosaniline; Phenol Red; B-phycoerythrin; o-phthaldialdehyde; pyrene and derivatives: pyrene, pyrene butyrate, succinimidyl 1-pyrene; butyrate quantum dots; Reactive Red 4 (Cibacron™ Brilliant Red 3B-A) rhodamine and derivatives: 6-carboxy-X-rhodamine (ROX), 6-carboxyrhodamine (R6G), lissamine rhodamine B sulfonyl chloride rhodarnine (Rhod), rhodamine B, rhodamine 123, rhodamine X isothiocyanate, sulforhodamine B, sulforhodamine 101, sulfonyl chloride derivative of sulforhodamine 101 (Texas Red); N,N,N′,N′tetramethyl-6-carboxyrhodamine (TAMRA); tetramethyl rhodamine; tetramethyl rhodamine isothiocyanate (TRITC); riboflavin; rosolic acid; terbium chelate derivatives; Cyanine-3 (Cy3); Cyanine-5 (Cy5); Cyanine-5.5 (Cy5.5), Cyanine-7 (Cy7); IRD 700; IRD 800; Alexa 647; La Jolta Blue; phthalo cyanine; and naphthalo cyanine. In some embodiments, the detectable label is a fluorescent dye, such as Cy5 and Cy3.

[0544] Examples luminescent material includes luminol; examples of bioluminescent materials include luciferase, luciferin, and aequorin.

[0545] Examples of suitable radioactive material include ¹⁸F, ⁶⁷Ga, ^{81m}Kr, ⁸²Rb, ¹¹¹In, ¹²³I, ¹³³Xe, ²⁰¹Tl, ¹²⁵I, ³⁵S, ¹⁴C, or ³H, ^{99m}Tc (e.g., as pertechnetate (technetate(VII), TcO₄⁻) either directly or indirectly, or other radioisotope detectable by direct counting of radioemission or by scintillation counting.

[0546] In addition, contrast agents, e.g., contrast agents for MRI or NMR, for X-ray CT, Raman imaging, optical coherence tomography, absorption imaging, ultrasound imaging, or thermal imaging can be used. Exemplary contrast agents include gold (e.g., gold nanoparticles), gadolinium (e.g., chelated Gd), iron oxides (e.g., superparamagnetic iron oxide (SPIO), monocrystalline iron oxide nanoparticles (MIONs), and ultrasmall superparamagnetic iron oxide (USPIO)), manganese chelates (e.g., Mn-DPDP), barium sulfate, iodinated contrast media (iohexol), microbubbles, or perfluorocarbons can also be used.

[0547] In some embodiments, the detectable agent is a non-detectable pre-cursor that becomes detectable upon activation. Examples include fluorogenic tetrazine-fluorophore constructs (e.g., tetrazine-BODIPY FL, tetrazine-Oregon Green 488, or tetrazine-BODIPY TMR-X) or enzyme activatable fluorogenic agents (e.g., PROSENSE (VisEn Medical)).

[0548] When the compounds are enzymatically labeled with, for example, horseradish peroxidase, alkaline phosphatase, or luciferase, the enzymatic label is detected by determination of conversion of an appropriate substrate to product.

[0549] In vitro assays in which these compositions can be used include enzyme linked immunosorbent assays (ELISAs), immunoprecipitations, immunofluorescence, enzyme immunoassay (EIA), radioimmunoassay (RIA), and Western blot analysis.

[0550] Labels other than those described herein are contemplated by the present disclosure, including other optically-detectable labels. Labels can be attached to the modified nucleotide of the present disclosure at any position using standard chemistries such that the label can be removed from the incorporated base upon cleavage of the cleavable linker.

### Payload: Cell Penetrating Payloads

[0551] In some embodiments, the modified nucleotides and modified nucleic acids can also include a payload that can be a cell penetrating moiety or agent that enhances intracellular delivery of the compositions. For example, the compositions can include a cell-penetrating peptide sequence that facilitates delivery to the intracellular space, e.g., HIV-derived TAT peptide, penetratins, transportans, or hCT derived cell-penetrating peptides, see, e.g., Caron et al., (2001) Mol Ther. 3(3):310-8; Langel, Cell-Penetrating Peptides: Processes and Applications (CRC Press, Boca Raton Fla. 2002); El-Andaloussi et al., (2005) Curr Pharm Des. 11(28):3597-611; and Deshayes et al., (2005) Cell Mol Life Sci. 62(16):1839-49. The compositions can also be formulated to include a cell penetrating agent, e.g., liposomes, which enhance delivery of the compositions to the intracellular space.

### Payload: Biological Targets

[0552] The modified nucleotides and modified nucleic acids described herein can be used to deliver a payload to any biological target for which a specific ligand exists or can be generated. The ligand can bind to the biological target either covalently or non-covalently.

[0553] Exemplary biological targets include biopolymers, e.g., antibodies, nucleic acids such as RNA and DNA, proteins, enzymes; exemplary proteins include enzymes, receptors, and ion channels. In some embodiments the target is a tissue- or cell-type specific marker, e.g., a protein that is expressed specifically on a selected tissue or cell type. In some embodiments, the target is a receptor, such as, but not limited to, plasma membrane receptors and nuclear receptors; more specific examples include G-protein-coupled receptors, cell pore proteins, transporter proteins, surface-expressed antibodies, HLA proteins, MHC proteins and growth factor receptors.

### Synthesis of Modified Nucleotides

[0554] The modified nucleosides and nucleotides disclosed herein can be prepared from readily available starting materials using the following general methods and procedures. It is understood that where typical or preferred process conditions (i.e., reaction temperatures, times, mole ratios of reactants, solvents, pressures, etc.) are given; other process conditions can also be used unless otherwise stated. Optimum reaction conditions may vary with the particular reactants or solvent used, but such conditions can be determined by one skilled in the art by routine optimization procedures.

[0555] The processes described herein can be monitored according to any suitable method known in the art. For example, product formation can be monitored by spectroscopic means, such as nuclear magnetic resonance spectroscopy (e.g., ¹H or ¹³C) infrared spectroscopy, spectrophotometry (e.g., UV-visible), or mass spectrometry, or by chromatography such as high performance liquid chromatography (HPLC) or thin layer chromatography.

[0556] Preparation of modified nucleosides and nucleotides can involve the protection and deprotection of various chemical groups. The need for protection and deprotection, and the selection of appropriate protecting groups can be readily determined by one skilled in the art. The chemistry of protecting groups can be found, for example, in Greene, et al., Protective Groups in Organic Synthesis, 2d. Ed., Wiley & Sons, 1991, which is incorporated herein by reference in its entirety.

[0557] The reactions of the processes described herein can be carried out in suitable solvents, which can be readily selected by one of skill in the art of organic synthesis. Suitable solvents can be substantially nonreactive with the starting materials (reactants), the intermediates, or products at the temperatures at which the reactions are carried out, i.e., temperatures which can range from the solvent's freezing temperature to the solvent's boiling temperature. A given reaction can be carried out in one solvent or a mixture of more than one solvent. Depending on the particular reaction step, suitable solvents for a particular reaction step can be selected.

[0558] Resolution of racemic mixtures of modified nucleosides and nucleotides can be carried out by any of numerous methods known in the art. An example method includes fractional recrystallization using a “chiral resolving acid” which is an optically active, salt-forming organic acid. Suitable resolving agents for fractional recrystallization methods are, for example, optically active acids, such as the D and L forms of tartaric acid, diacetyltartaric acid, dibenzoyltartaric acid, mandelic acid, malic acid, lactic acid or the various optically active camphorsulfonic acids. Resolution of racemic mixtures can also be carried out by elution on a column packed with an optically active resolving agent (e.g., dinitrobenzoylphenylglycine). Suitable elution solvent composition can be determined by one skilled in the art.

[0559] Exemplary syntheses of modified nucleotides, which are incorporated into nucleic acids or modified RNA, e.g., RNA or mRNA, are provided below in Scheme 2 through Scheme 12. Scheme 2 provides a general method for phosphorylation of nucleosides, including modified nucleosides.

[chemical structure]

[0560] Various protecting groups may be used to control the reaction. For example, Scheme 3 provides the use of multiple protecting and deprotecting steps to promote phosphorylation at the 5′ position of the sugar, rather than the 2′ and 3′ hydroxyl groups.

[chemical structure]

[0561] Modified nucleotides can be synthesized in any useful manner. Schemes 4, 5, and 8 provide exemplary methods for synthesizing modified nucleotides having a modified purine nucleobase; and Schemes 6 and 7 provide exemplary methods for synthesizing modified nucleotides having a modified pseudouridine or pseudoisocytidine, respectively.

[chemical structure]

[chemical structure]

[chemical structure]

[chemical structure]

[chemical structure]

[0562] Schemes 9 and 10 provide exemplary syntheses of modified nucleotides. Scheme 11 provides a non-limiting biocatalytic method for producing nucleotides.

[chemical structure]

[chemical structure]

[chemical structure]

[0563] Scheme 12 provides an exemplary synthesis of a modified uracil, where the N1 position is modified with R^{12b}, as provided elsewhere, and the 5′-position of ribose is phosphorylated. T¹, T², R^{12a}, R^{12b}, and r are as provided herein. This synthesis, as well as optimized versions thereof, can be used to modify pyrimidine nucleobases and purine nucleobases (see e.g., Formulas (b1)-(b43)) and/or to install one or more phosphate groups (e.g., at the 5′ position of the sugar). This alkylating reaction can also be used to include one or more optionally substituted alkyl group at any reactive group (e.g., amino group) in any nucleobase described herein (e.g., the amino groups in the Watson-Crick base-pairing face for cytosine, uracil, adenine, and guanine)

[chemical structure]

[0564] Modified nucleosides and nucleotides can also be prepared according to the synthetic methods described in Ogata et al. Journal of Organic Chemistry 74:2585-2588, 2009; Purmal et al. Nucleic Acids Research 22(1): 72-78, 1994; Fukuhara et al. Biochemistry 1(4): 563-568, 1962; and Xu et al. Tetrahedron 48(9): 1729-1740, 1992, each of which are incorporated by reference in their entirety.

### Length

[0565] Generally, the length of a modified mRNA of the present invention is greater than 30 nucleotides in length. In another embodiment, the RNA molecule is greater than 35 nucleotides in length. In another embodiment, the length is at least 40 nucleotides. In another embodiment, the length is at least 45 nucleotides. In another embodiment, the length is at least 55 nucleotides. In another embodiment, the length is at least 60 nucleotides. In another embodiment, the length is at least 60 nucleotides. In another embodiment, the length is at least 80 nucleotides. In another embodiment, the length is at least 90 nucleotides. In another embodiment, the length is at least 100 nucleotides. In another embodiment, the length is at least 120 nucleotides. In another embodiment, the length is at least 140 nucleotides. In another embodiment, the length is at least 160 nucleotides. In another embodiment, the length is at least 180 nucleotides. In another embodiment, the length is at least 200 nucleotides. In another embodiment, the length is at least 250 nucleotides. In another embodiment, the length is at least 300 nucleotides. In another embodiment, the length is at least 350 nucleotides. In another embodiment, the length is at least 400 nucleotides. In another embodiment, the length is at least 450 nucleotides. In another embodiment, the length is at least 500 nucleotides. In another embodiment, the length is at least 600 nucleotides. In another embodiment, the length is at least 700 nucleotides. In another embodiment, the length is at least 800 nucleotides. In another embodiment, the length is at least 900 nucleotides. In another embodiment, the length is at least 1000 nucleotides. In another embodiment, the length is at least 1100 nucleotides. In another embodiment, the length is at least 1200 nucleotides. In another embodiment, the length is at least 1300 nucleotides. In another embodiment, the length is at least 1400 nucleotides. In another embodiment, the length is at least 1500 nucleotides. In another embodiment, the length is at least 1600 nucleotides. In another embodiment, the length is at least 1800 nucleotides. In another embodiment, the length is at least 2000 nucleotides. In another embodiment, the length is at least 2500 nucleotides. In another embodiment, the length is at least 3000 nucleotides. In another embodiment, the length is at least 4000 nucleotides. In another embodiment, the length is at least 5000 nucleotides, or greater than 5000 nucleotides. In another embodiment, the length is at least 5000 nucleotides, or greater than 6000 nucleotides. In another embodiment, the length is at least 7000 nucleotides, or greater than 7000 nucleotides. In another embodiment, the length is at least 8000 nucleotides, or greater than 8000 nucleotides. In another embodiment, the length is at least 9000 nucleotides, or greater than 9000 nucleotides. In another embodiment, the length is at least 10,000 nucleotides, or greater than 10,000 nucleotides.

### Use of Modified RNAs

### Prevention or Reduction of Innate Cellular Immune Response Activation

[0566] The term “innate immune response” includes a cellular response to exogenous single stranded nucleic acids, generally of viral or bacterial origin, which involves the induction of cytokine expression and release, particularly the interferons, and cell death. Protein synthesis is also reduced during the innate cellular immune response. While it is advantageous to eliminate the innate immune response in a cell, the invention provides modified mRNAs that substantially reduce the immune response, including interferon signaling, without entirely eliminating such a response. In some embodiments, the immune response is reduced by 10%, 20%, 30%, 40%, 50%, 60%, 70%, 80%, 90%, 95%, 99%, 99.9%, or greater than 99.9% as compared to the immune response induced by a corresponding unmodified nucleic acid. Such a reduction can be measured by expression or activity level of Type 1 interferons or the expression of interferon-regulated genes such as the toll-like receptors (e.g., TLR7 and TLR8). Reduction of innate immune response can also be measured by decreased cell death following one or more administrations of modified RNAs to a cell population; e.g., cell death is 10%, 25%, 50%, 75%, 85%, 90%, 95%, or over 95% less than the cell death frequency observed with a corresponding unmodified nucleic acid. Moreover, cell death may affect fewer than 50%, 40%, 30%, 20%, 10%, 5%, 1%, 0.1%, 0.01% or fewer than 0.01% of cells contacted with the modified nucleic acids.

[0567] The invention provides for the repeated introduction (e.g., transfection) of modified nucleic acids into a target cell population, e.g., in vitro, ex vivo, or in vivo. The step of contacting the cell population may be repeated one or more times (such as two, three, four, five or more than five times). In some embodiments, the step of contacting the cell population with the modified nucleic acids is repeated a number of times sufficient such that a predetermined efficiency of protein translation in the cell population is achieved. Given the reduced cytotoxicity of the target cell population provided by the nucleic acid modifications, such repeated transfections are achievable in a diverse array of cell types.

### Major Groove Interacting Partners

[0568] As described herein, the phrase “major groove interacting partner” refers to RNA recognition receptors that detect and respond to RNA ligands through interactions, e.g. binding, with the major groove face of a nucleotide or nucleic acid. As such, RNA ligands comprising modified nucleotides or nucleic acids such as the modified RNAs as described herein decrease interactions with major groove binding partners, and therefore decrease an innate immune response.

[0569] Example major groove interacting, e.g. binding, partners include, but are not limited to the following nucleases and helicases. Within membranes, TLRs (Toll-like Receptors) 3, 7, and 8 can respond to single- and double-stranded RNAs. Within the cytoplasm, members of the superfamily 2 class of DEX(D/H) helicases and ATPases can sense RNAs to initiate antiviral responses. These helicases include the RIG-I (retinoic acid-inducible gene I) and MDA5 (melanoma differentiation-associated gene 5). Other examples include laboratory of genetics and physiology 2 (LGP2), HIN-200 domain containing proteins, or Helicase-domain containing proteins.

### Polypeptide Variants

[0570] Provided are nucleic acids that encode variant polypeptides, which have a certain identity with a reference polypeptide sequence. The term “identity” as known in the art, refers to a relationship between the sequences of two or more peptides, as determined by comparing the sequences. In the art, “identity” also means the degree of sequence relatedness between peptides, as determined by the number of matches between strings of two or more amino acid residues.

[0571] “Identity” measures the percent of identical matches between the smaller of two or more sequences with gap alignments (if any) addressed by a particular mathematical model or computer program (i.e., “algorithms”). Identity of related peptides can be readily calculated by known methods. Such methods include, but are not limited to, those described in Computational Molecular Biology, Lesk, A. M., ed., Oxford University Press, New York, 1988; Biocomputing: Informatics and Genome Projects, Smith, D. W., ed., Academic Press, New York, 1993; Computer Analysis of Sequence Data, Part 1, Griffin, A. M., and Griffin, H. G., eds., Humana Press, New Jersey, 1994; Sequence Analysis in Molecular Biology, von Heinje, G., Academic Press, 1987; Sequence Analysis Primer, Gribskov, M. and Devereux, J., eds., M. Stockton Press, New York, 1991; and Carillo et al., SIAM J. Applied Math. 48, 1073 (1988).

[0572] In some embodiments, the polypeptide variant has the same or a similar activity as the reference polypeptide. Alternatively, the variant has an altered activity (e.g., increased or decreased) relative to a reference polypeptide. Generally, variants of a particular polynucleotide or polypeptide of the invention will have at least about 40%, 45%, 50%, 55%, 60%, 65%, 70%, 75%, 80%, 85%, 90%, 91%, 92%, 93%, 94%, 95%, 96%, 97%, 98%, 99% or more sequence identity to that particular reference polynucleotide or polypeptide as determined by sequence alignment programs and parameters described herein and known to those skilled in the art.

[0573] As recognized by those skilled in the art, protein fragments, functional protein domains, and homologous proteins are also considered to be within the scope of this invention. For example, provided herein is any protein fragment of a reference protein (meaning a polypeptide sequence at least one amino acid residue shorter than a reference polypeptide sequence but otherwise identical) 10, 20, 30, 40, 50, 60, 70, 80, 90, 100 or greater than 100 amino acids in length In another example, any protein that includes a stretch of about 20, about 30, about 40, about 50, or about 100 amino acids which are about 40%, about 50%, about 60%, about 70%, about 80%, about 90%, about 95%, or about 100% identical to any of the sequences described herein can be utilized in accordance with the invention. In certain embodiments, a protein sequence to be utilized in accordance with the invention includes 2, 3, 4, 5, 6, 7, 8, 9, 10, or more mutations as shown in any of the sequences provided or referenced herein.

### Polypeptide Libraries

[0574] Also provided are polynucleotide libraries containing nucleoside modifications, wherein the polynucleotides individually contain a first nucleic acid sequence encoding a polypeptide, such as an antibody, protein binding partner, scaffold protein, and other polypeptides known in the art. Preferably, the polynucleotides are mRNA in a form suitable for direct introduction into a target cell host, which in turn synthesizes the encoded polypeptide.

[0575] In certain embodiments, multiple variants of a protein, each with different amino acid modification(s), are produced and tested to determine the best variant in terms of pharmacokinetics, stability, biocompatibility, and/or biological activity, or a biophysical property such as expression level. Such a library may contain 10, 10², 10³, 10⁴, 10⁵, 10⁶, 10⁷, 10⁸, 10⁹, or over 10⁹ possible variants (including substitutions, deletions of one or more residues, and insertion of one or more residues).

### Polypeptide-Nucleic Acid Complexes

[0576] Proper protein translation involves the physical aggregation of a number of polypeptides and nucleic acids associated with the mRNA. Provided by the invention are complexes containing conjugates of protein and nucleic acids, containing a translatable mRNA having one or more nucleoside modifications (e.g., at least two different nucleoside modifications) and one or more polypeptides bound to the mRNA. Generally, the proteins are provided in an amount effective to prevent or reduce an innate immune response of a cell into which the complex is introduced.

### Targeting Moieties

[0577] In embodiments of the invention, modified nucleic acids are provided to express a protein-binding partner or a receptor on the surface of the cell, which functions to target the cell to a specific tissue space or to interact with a specific moiety, either in vivo or in vitro. Suitable protein-binding partners include antibodies and functional fragments thereof, scaffold proteins, or peptides. Additionally, modified nucleic acids can be employed to direct the synthesis and extracellular localization of lipids, carbohydrates, or other biological moieties.

[0578] As described herein, a useful feature of the modified nucleic acids of the invention is the capacity to reduce the innate immune response of a cell to an exogenous nucleic acid. Provided are methods for performing the titration, reduction or elimination of the immune response in a cell or a population of cells. In some embodiments, the cell is contacted with a first composition that contains a first dose of a first exogenous nucleic acid including a translatable region and at least one nucleoside modification, and the level of the innate immune response of the cell to the first exogenous nucleic acid is determined. Subsequently, the cell is contacted with a second composition, which includes a second dose of the first exogenous nucleic acid, the second dose containing a lesser amount of the first exogenous nucleic acid as compared to the first dose.

[0579] Alternatively, the cell is contacted with a first dose of a second exogenous nucleic acid. The second exogenous nucleic acid may contain one or more modified nucleosides, which may be the same or different from the first exogenous nucleic acid or, alternatively, the second exogenous nucleic acid may not contain modified nucleosides. The steps of contacting the cell with the first composition and/or the second composition may be repeated one or more times.

[0580] Additionally, efficiency of protein production (e.g., protein translation) in the cell is optionally determined, and the cell may be re-transfected with the first and/or second composition repeatedly until a target protein production efficiency is achieved.

### Vaccines

[0581] As described herein, provided are mRNAs having sequences that are substantially not translatable. Such mRNA is effective as a vaccine when administered to a mammalian subject.

[0582] Also provided are modified nucleic acids that contain one or more noncoding regions. Such modified nucleic acids are generally not translated, but are capable of binding to and sequestering one or more translational machinery component such as a ribosomal protein or a transfer RNA (tRNA), thereby effectively reducing protein expression in the cell. The modified nucleic acid may contain a small nucleolar RNA (sno-RNA), micro RNA (miRNA), small interfering RNA (siRNA) or Piwi-interacting RNA (piRNA).

[0583] Additionally, certain modified nucleosides, or combinations thereof, when introduced into modified nucleic acids activate the innate immune response. Such activating modified nucleic acids, e.g., modified RNAs, are useful as adjuvants when combined with polypeptide or other vaccines. In certain embodiments, the activated modified mRNAs contain a translatable region which encodes for a polypeptide sequence useful as a vaccine, thus providing the ability to be a self-adjuvant.

### Therapeutic Agents

[0584] The modified nucleic acids (modified RNAs) and the proteins translated from the modified nucleic acids described herein can be used as therapeutic agents. For example, a modified nucleic acid described herein can be administered to a subject, wherein the modified nucleic acid is translated in vivo to produce a therapeutic peptide in the subject. Provided are compositions, methods, kits, and reagents for treatment or prevention of disease or conditions in humans and other mammals. The active therapeutic agents of the invention include modified nucleic acids, cells containing modified nucleic acids or polypeptides translated from the modified nucleic acids, polypeptides translated from modified nucleic acids, and cells contacted with cells containing modified nucleic acids or polypeptides translated from the modified nucleic acids.

[0585] In certain embodiments, provided are combination therapeutics containing one or more modified nucleic acids containing translatable regions that encode for a protein or proteins that boost a mammalian subject's immunity along with a protein that induces antibody-dependent cellular toxicity. For example, provided are therapeutics containing one or more nucleic acids that encode trastuzumab and granulocyte-colony stimulating factor (G-CSF). In particular, such combination therapeutics are useful in Her2+ breast cancer patients who develop induced resistance to trastuzumab. (See, e.g., Albrecht, Immunotherapy. 2(6):795-8 (2010)).

[0586] Provided are methods of inducing translation of a recombinant polypeptide in a cell population using the modified nucleic acids described herein. Such translation can be in vivo, ex vivo, in culture, or in vitro. The cell population is contacted with an effective amount of a composition containing a nucleic acid that has at least one nucleoside modification, and a translatable region encoding the recombinant polypeptide. The population is contacted under conditions such that the nucleic acid is localized into one or more cells of the cell population and the recombinant polypeptide is translated in the cell from the nucleic acid.

[0587] An effective amount of the composition is provided based, at least in part, on the target tissue, target cell type, means of administration, physical characteristics of the nucleic acid (e.g., size, and extent of modified nucleosides), and other determinants. In general, an effective amount of the composition provides efficient protein production in the cell, preferably more efficient than a composition containing a corresponding unmodified nucleic acid. Increased efficiency may be demonstrated by increased cell transfection (i.e., the percentage of cells transfected with the nucleic acid), increased protein translation from the nucleic acid, decreased nucleic acid degradation (as demonstrated, e.g., by increased duration of protein translation from a modified nucleic acid), or reduced innate immune response of the host cell.

[0588] Aspects of the invention are directed to methods of inducing in vivo translation of a recombinant polypeptide in a mammalian subject in need thereof. Therein, an effective amount of a composition containing a nucleic acid that has at least one nucleoside modification and a translatable region encoding the recombinant polypeptide is administered to the subject using the delivery methods described herein. The nucleic acid is provided in an amount and under other conditions such that the nucleic acid is localized into a cell of the subject and the recombinant polypeptide is translated in the cell from the nucleic acid. The cell in which the nucleic acid is localized, or the tissue in which the cell is present, may be targeted with one or more than one rounds of nucleic acid administration.

[0589] Other aspects of the invention relate to transplantation of cells containing modified nucleic acids to a mammalian subject. Administration of cells to mammalian subjects is known to those of ordinary skill in the art, such as local implantation (e.g., topical or subcutaneous administration), organ delivery or systemic injection (e.g., intravenous injection or inhalation), as is the formulation of cells in pharmaceutically acceptable carrier. Compositions containing modified nucleic acids are formulated for administration intramuscularly, transarterially, intraocularly, vaginally, rectally, intraperitoneally, intravenously, intranasally, subcutaneously, endoscopically, transdermally, or intrathecally. In some embodiments, the composition is formulated for extended release.

[0590] The subject to whom the therapeutic agent is administered suffers from or is at risk of developing a disease, disorder, or deleterious condition. Provided are methods of identifying, diagnosing, and classifying subjects on these bases, which may include clinical diagnosis, biomarker levels, genome-wide association studies (GWAS), and other methods known in the art.

[0591] In certain embodiments, the administered modified nucleic acid directs production of one or more recombinant polypeptides that provide a functional activity which is substantially absent in the cell in which the recombinant polypeptide is translated. For example, the missing functional activity may be enzymatic, structural, or gene regulatory in nature. In related embodiments, the administered modified nucleic acid directs production of one or more recombinant polypeptides that increases (e.g., synergistically) a functional activity which is present but substantially deficient in the cell in which the recombinant polypeptide is translated.

[0592] In other embodiments, the administered modified nucleic acid directs production of one or more recombinant polypeptides that replace a polypeptide (or multiple polypeptides) that is substantially absent in the cell in which the recombinant polypeptide is translated. Such absence may be due to genetic mutation of the encoding gene or regulatory pathway thereof. In some embodiments, the recombinant polypeptide increases the level of an endogenous protein in the cell to a desirable level; such an increase may bring the level of the endogenous protein from a subnormal level to a normal level, or from a normal level to a super-normal level.

[0593] Alternatively, the recombinant polypeptide functions to antagonize the activity of an endogenous protein present in, on the surface of, or secreted from the cell. Usually, the activity of the endogenous protein is deleterious to the subject, for example, do to mutation of the endogenous protein resulting in altered activity or localization. Additionally, the recombinant polypeptide antagonizes, directly or indirectly, the activity of a biological moiety present in, on the surface of, or secreted from the cell. Examples of antagonized biological moieties include lipids (e.g., cholesterol), a lipoprotein (e.g., low density lipoprotein), a nucleic acid, a carbohydrate, a protein toxin such as shiga and tetanus toxins, or a small molecule toxin such as botulinum, cholera, and diphtheria toxins. Additionally, the antagonized biological molecule may be an endogenous protein that exhibits an undesirable activity, such as a cytotoxic or cytostatic activity. The recombinant proteins described herein are engineered for localization within the cell, potentially within a specific compartment such as the nucleus, or are engineered for secretion from the cell or translocation to the plasma membrane of the cell.

### Therapeutics

[0594] Provided are methods for treating or preventing a symptom of diseases characterized by missing or aberrant protein activity, by replacing the missing protein activity or overcoming the aberrant protein activity. Because of the rapid initiation of protein production following introduction of modified mRNAs, as compared to viral DNA vectors, the compounds of the present invention are particularly advantageous in treating acute diseases such as sepsis, stroke, and myocardial infarction. Moreover, the lack of transcriptional regulation of the modified mRNAs of the invention is advantageous in that accurate titration of protein production is achievable.

[0595] In some embodiments, modified mRNAs and their encoded polypeptides in accordance with the present invention may be used for therapeutic purposes. In some embodiments, modified mRNAs and their encoded polypeptides in accordance with the present invention may be used for treatment of any of a variety of diseases, disorders, and/or conditions, including but not limited to one or more of the following: autoimmune disorders (e.g. diabetes, lupus, multiple sclerosis, psoriasis, rheumatoid arthritis); inflammatory disorders (e.g. arthritis, pelvic inflammatory disease); infectious diseases (e.g. viral infections (e.g., HIV, HCV, RSV), bacterial infections, fungal infections, sepsis); neurological disorders (e g. Alzheimer's disease, Huntington's disease; autism; Duchenne muscular dystrophy); cardiovascular disorders (e.g. atherosclerosis, hypercholesterolemia, thrombosis, clotting disorders, angiogenic disorders such as macular degeneration); proliferative disorders (e.g. cancer, benign neoplasms); respiratory disorders (e.g. chronic obstructive pulmonary disease); digestive disorders (e.g. inflammatory bowel disease, ulcers); musculoskeletal disorders (e.g. fibromyalgia, arthritis); endocrine, metabolic, and nutritional disorders (e.g. diabetes, osteoporosis); urological disorders (e.g. renal disease); psychological disorders (e.g. depression, schizophrenia); skin disorders (e.g. wounds, eczema); blood and lymphatic disorders (e.g. anemia, hemophilia); etc.

[0596] Diseases characterized by dysfunctional or aberrant protein activity include cystic fibrosis, sickle cell anemia, epidermolysis bullosa, amyotrophic lateral sclerosis, and glucose-6-phosphate dehydrogenase deficiency. The present invention provides a method for treating such conditions or diseases in a subject by introducing nucleic acid or cell-based therapeutics containing the modified nucleic acids provided herein, wherein the modified nucleic acids encode for a protein that antagonizes or otherwise overcomes the aberrant protein activity present in the cell of the subject. Specific examples of a dysfunctional protein are the missense mutation variants of the cystic fibrosis transmembrane conductance regulator (CFTR) gene, which produce a dysfunctional protein variant of CFTR protein, which causes cystic fibrosis.

[0597] Diseases characterized by missing (or substantially diminished such that proper protein function does not occur) protein activity include cystic fibrosis, Niemann-Pick type C, β thalassemia major, Duchenne muscular dystrophy, Hurler Syndrome, Hunter Syndrome, and Hemophilia A. Such proteins may not be present, or are essentially nonfunctional. The present invention provides a method for treating such conditions or diseases in a subject by introducing nucleic acid or cell-based therapeutics containing the modified nucleic acids provided herein, wherein the modified nucleic acids encode for a protein that replaces the protein activity missing from the target cells of the subject. Specific examples of a dysfunctional protein are the nonsense mutation variants of the cystic fibrosis transmembrane conductance regulator (CFTR) gene, which produce a nonfunctional protein variant of CFTR protein, which causes cystic fibrosis.

[0598] Thus, provided are methods of treating cystic fibrosis in a mammalian subject by contacting a cell of the subject with a modified nucleic acid having a translatable region that encodes a functional CFTR polypeptide, under conditions such that an effective amount of the CTFR polypeptide is present in the cell. Preferred target cells are epithelial, endothelial and mesothelial cells, such as the lung, and methods of administration are determined in view of the target tissue; i.e., for lung delivery, the RNA molecules are formulated for administration by inhalation.

[0599] In another embodiment, the present invention provides a method for treating hyperlipidemia in a subject, by introducing into a cell population of the subject with a modified mRNA molecule encoding Sortilin, a protein recently characterized by genomic studies, thereby ameliorating the hyperlipidemia in a subject. The SORT1 gene encodes a trans-Golgi network (TGN) transmembrane protein called Sortilin. Genetic studies have shown that one of five individuals has a single nucleotide polymorphism, rs12740374, in the 1p13 locus of the SORT1 gene that predisposes them to having low levels of low-density lipoprotein (LDL) and very-low-density lipoprotein (VLDL). Each copy of the minor allele, present in about 30% of people, alters LDL cholesterol by 8 mg/dL, while two copies of the minor allele, present in about 5% of the population, lowers LDL cholesterol 16 mg/dL. Carriers of the minor allele have also been shown to have a 40% decreased risk of myocardial infarction. Functional in vivo studies in mice describes that overexpression of SORT1 in mouse liver tissue led to significantly lower LDL-cholesterol levels, as much as 80% lower, and that silencing SORT1 increased LDL cholesterol approximately 200% (Musunuru K et al. From noncoding variant to phenotype via SORT1 at the 1p13 cholesterol locus. Nature 2010; 466: 714-721).

### Modulation of Cell Fate

[0600] Provided are methods of inducing an alteration in cell fate in a target mammalian cell. The target mammalian cell may be a precursor cell and the alteration may involve driving differentiation into a lineage, or blocking such differentiation. Alternatively, the target mammalian cell may be a differentiated cell, and the cell fate alteration includes driving de-differentiation into a pluripotent precursor cell, or blocking such de-differentiation, such as the dedifferentiation of cancer cells into cancer stem cells. In situations where a change in cell fate is desired, effective amounts of mRNAs encoding a cell fate inductive polypeptide is introduced into a target cell under conditions such that an alteration in cell fate is induced. In some embodiments, the modified mRNAs are useful to reprogram a subpopulation of cells from a first phenotype to a second phenotype. Such a reprogramming may be temporary or permanent.

[0601] Optionally, the reprogramming induces a target cell to adopt an intermediate phenotype.

[0602] Additionally, the methods of the present invention are particularly useful to generate induced pluripotent stem cells (iPS cells) because of the high efficiency of transfection, the ability to re-transfect cells, and the tenability of the amount of recombinant polypeptides produced in the target cells. Further, the use of iPS cells generated using the methods described herein is expected to have a reduced incidence of teratoma formation.

[0603] Also provided are methods of reducing cellular differentiation in a target cell population. For example, a target cell population containing one or more precursor cell types is contacted with a composition having an effective amount of a modified mRNA encoding a polypeptide, under conditions such that the polypeptide is translated and reduces the differentiation of the precursor cell. In non-limiting embodiments, the target cell population contains injured tissue in a mammalian subject or tissue affected by a surgical procedure. The precursor cell is, e.g., a stromal precursor cell, a neural precursor cell, or a mesenchymal precursor cell.

[0604] In a specific embodiment, provided are modified nucleic acids that encode one or more differentiation factors Gata4, Mef2c and Tbx4. These mRNA-generated factors are introduced into fibroblasts and drive the reprogramming into cardiomyocytes. Such a reprogramming can be performed in vivo, by contacting an mRNA-containing patch or other material to damaged cardiac tissue to facilitate cardiac regeneration. Such a process promotes cardiomyocyte genesis as opposed to fibrosis.

### Targeting of Pathogenic Organisms; Purification of Biological Materials

[0605] Provided herein are methods for targeting pathogenic microorganisms, such as bacteria, yeast, protozoa, helminthes and the like, using modified mRNAs that encode cytostatic or cytotoxic polypeptides. Preferably the mRNA introduced into the target pathogenic organism contains modified nucleosides or other nucleic acid sequence modifications that the mRNA is translated exclusively, or preferentially, in the target pathogenic organism, to reduce possible off-target effects of the therapeutic. Such methods are useful for removing pathogenic organisms from biological material, including blood, semen, eggs, and transplant materials including embryos, tissues, and organs.

### Targeting Diseased Cells

[0606] Provided herein are methods for targeting pathogenic or diseased cells, particularly cancer cells, using modified mRNAs that encode cytostatic or cytotoxic polypeptides. Preferably the mRNA introduced into the target pathogenic cell contains modified nucleosides or other nucleic acid sequence modifications that the mRNA is translated exclusively, or preferentially, in the target pathogenic cell, to reduce possible off-target effects of the therapeutic. Alternatively, the invention provides targeting moieties that are capable of targeting the modified mRNAs to preferentially bind to and enter the target pathogenic cell.

### Protein Production

[0607] The methods provided herein are useful for enhancing protein product yield in a cell culture process. In a cell culture containing a plurality of host cells, introduction of the modified mRNAs described herein results in increased protein production efficiency relative to a corresponding unmodified nucleic acid. Such increased protein production efficiency can be demonstrated, e.g., by showing increased cell transfection, increased protein translation from the nucleic acid, decreased nucleic acid degradation, and/or reduced innate immune response of the host cell. Protein production can be measured by ELISA, and protein activity can be measured by various functional assays known in the art. The protein production may be generated in a continuous or a fed-batch mammalian process.

[0608] Additionally, it is useful to optimize the expression of a specific polypeptide in a cell line or collection of cell lines of potential interest, particularly an engineered protein such as a protein variant of a reference protein having a known activity. In one embodiment, provided is a method of optimizing expression of an engineered protein in a target cell, by providing a plurality of target cell types, and independently contacting with each of the plurality of target cell types a modified mRNA encoding an engineered polypeptide. Additionally, culture conditions may be altered to increase protein production efficiency. Subsequently, the presence and/or level of the engineered polypeptide in the plurality of target cell types is detected and/or quantitated, allowing for the optimization of an engineered polypeptide's expression by selection of an efficient target cell and cell culture conditions relating thereto. Such methods are particularly useful when the engineered polypeptide contains one or more post-translational modifications or has substantial tertiary structure, situations which often complicate efficient protein production.

### Gene Silencing

[0609] The modified mRNAs described herein are useful to silence (i.e., prevent or substantially reduce) expression of one or more target genes in a cell population. A modified mRNA encoding a polypeptide capable of directing sequence-specific histone H3 methylation is introduced into the cells in the population under conditions such that the polypeptide is translated and reduces gene transcription of a target gene via histone H3 methylation and subsequent heterochromatin formation. In some embodiments, the silencing mechanism is performed on a cell population present in a mammalian subject. By way of non-limiting example, a useful target gene is a mutated Janus Kinase-2 family member, wherein the mammalian subject expresses the mutant target gene suffers from a myeloproliferative disease resulting from aberrant kinase activity.

[0610] Co-administration of modified mRNAs and siRNAs are also provided herein. As demonstrated in yeast, sequence-specific trans silencing is an effective mechanism for altering cell function. Fission yeast require two RNAi complexes for siRNA-mediated heterochromatin assembly: the RNA-induced transcriptional silencing (RITS) complex and the RNA-directed RNA polymerase complex (RDRC) (Motamedi et al. Cell 2004, 119, 789-802). In fission yeast, the RITS complex contains the siRNA binding Argonaute family protein Ago1, a chromodomain protein Chp1, and Tas3. The fission yeast RDRC complex is composed of an RNA-dependent RNA Polymerase Rdp1, a putative RNA helicase Hrr1, and a polyA polymerase family protein Cid12. These two complexes require the Dicer ribonuclease and Clr4 histone H3 methyltransferase for activity. Together, Ago1 binds siRNA molecules generated through Dicer-mediated cleavage of Rdp1 co-transcriptionally generated dsRNA transcripts and allows for the sequence-specific direct association of Chp1, Tas3, Hrr1, and Clr4 to regions of DNA destined for methylation and histone modification and subsequent compaction into transcriptionally silenced heterochromatin. While this mechanism functions in cis- with centromeric regions of DNA, sequence-specific trans silencing is possible through co-transfection with double-stranded siRNAs for specific regions of DNA and concomitant RNAi-directed silencing of the siRNA ribonuclease Eri1 (Buhler et al. Cell 2006, 125, 873-886).

### Modulation of Biological Pathways

[0611] The rapid translation of modified mRNAs introduced into cells provides a desirable mechanism of modulating target biological pathways. Such modulation includes antagonism or agonism of a given pathway. In one embodiment, a method is provided for antagonizing a biological pathway in a cell by contacting the cell with an effective amount of a composition comprising a modified nucleic acid encoding a recombinant polypeptide, under conditions such that the nucleic acid is localized into the cell and the recombinant polypeptide is capable of being translated in the cell from the nucleic acid, wherein the recombinant polypeptide inhibits the activity of a polypeptide functional in the biological pathway. Exemplary biological pathways are those defective in an autoimmune or inflammatory disorder such as multiple sclerosis, rheumatoid arthritis, psoriasis, lupus erythematosus, ankylosing spondylitis colitis, or Crohn's disease; in particular, antagonism of the IL-12 and IL-23 signaling pathways are of particular utility. (See Kikly K, Liu L, Na S, Sedgwick J D (2006) Curr. Opin. Immunol. 18 (6): 670-5).

[0612] Further, provided are modified nucleic acids encoding an antagonist for chemokine receptors; chemokine receptors CXCR-4 and CCR-5 are required for, e.g., HIV entry into host cells (Arenzana-Seisdedos F et al, (1996) Nature. October 3; 383(6599):400).

[0613] Alternatively, provided are methods of agonizing a biological pathway in a cell by contacting the cell with an effective amount of a modified nucleic acid encoding a recombinant polypeptide under conditions such that the nucleic acid is localized into the cell and the recombinant polypeptide is capable of being translated in the cell from the nucleic acid, and the recombinant polypeptide induces the activity of a polypeptide functional in the biological pathway. Exemplary agonized biological pathways include pathways that modulate cell fate determination. Such agonization is reversible or, alternatively, irreversible.

### Cellular Nucleic Acid Delivery

[0614] Methods of the present invention enhance nucleic acid delivery into a cell population, in vivo, ex vivo, or in culture. For example, a cell culture containing a plurality of host cells (e.g., eukaryotic cells such as yeast or mammalian cells) is contacted with a composition that contains an enhanced nucleic acid having at least one nucleoside modification and, optionally, a translatable region. The composition also generally contains a transfection reagent or other compound that increases the efficiency of enhanced nucleic acid uptake into the host cells. The enhanced nucleic acid exhibits enhanced retention in the cell population, relative to a corresponding unmodified nucleic acid. The retention of the enhanced nucleic acid is greater than the retention of the unmodified nucleic acid. In some embodiments, it is at least about 50%, 75%, 90%, 95%, 100%, 150%, 200% or more than 200% greater than the retention of the unmodified nucleic acid. Such retention advantage may be achieved by one round of transfection with the enhanced nucleic acid, or may be obtained following repeated rounds of transfection.

[0615] In some embodiments, the enhanced nucleic acid is delivered to a target cell population with one or more additional nucleic acids. Such delivery may be at the same time, or the enhanced nucleic acid is delivered prior to delivery of the one or more additional nucleic acids. The additional one or more nucleic acids may be modified nucleic acids or unmodified nucleic acids. It is understood that the initial presence of the enhanced nucleic acids does not substantially induce an innate immune response of the cell population and, moreover, that the innate immune response will not be activated by the later presence of the unmodified nucleic acids. In this regard, the enhanced nucleic acid may not itself contain a translatable region, if the protein desired to be present in the target cell population is translated from the unmodified nucleic acids.

### IV. Pharmaceutical Compositions

### Formulation, Administration, Delivery and Dosing

[0616] The present invention provides polynucleotides, modified nucleic acid, enhanced modified RNA and ribonucleic acid compositions and complexes in combination with one or more pharmaceutically acceptable excipients. Pharmaceutical compositions may optionally comprise one or more additional active substances, e.g. therapeutically and/or prophylactically active substances. General considerations in the formulation and/or manufacture of pharmaceutical agents may be found, for example, in Remington: The Science and Practice of Pharmacy 21^{st} ed., Lippincott Williams & Wilkins, 2005 (incorporated herein by reference).

[0617] In one embodiment, provided are formulations containing an effective amount of a ribonucleic acid (e.g., an mRNA or a nucleic acid containing an mRNA) engineered to avoid an innate immune response of a cell into which the ribonucleic acid enters. The ribonucleic acid generally includes a nucleotide sequence encoding a polypeptide of interest.

[0618] In some embodiments, compositions are administered to humans, human patients or subjects. For the purposes of the present disclosure, the phrase “active ingredient” generally refers to a modified nucleic acid, an enhanced nucleic acid or a ribonucleic acid to be delivered as described herein.

[0619] Although the descriptions of pharmaceutical compositions provided herein are principally directed to pharmaceutical compositions which are suitable for administration to humans, it will be understood by the skilled artisan that such compositions are generally suitable for administration to any other animal, e.g., to non-human animals, e.g. non-human mammals. Modification of pharmaceutical compositions suitable for administration to humans in order to render the compositions suitable for administration to various animals is well understood, and the ordinarily skilled veterinary pharmacologist can design and/or perform such modification with merely ordinary, if any, experimentation. Subjects to which administration of the pharmaceutical compositions is contemplated include, but are not limited to, humans and/or other primates; mammals, including commercially relevant mammals such as cattle, pigs, horses, sheep, cats, dogs, mice, and/or rats; and/or birds, including commercially relevant birds such as poultry, chickens, ducks, geese, and/or turkeys.

[0620] Formulations of the pharmaceutical compositions described herein may be prepared by any method known or hereafter developed in the art of pharmacology. In general, such preparatory methods include the step of bringing the active ingredient into association with an excipient and/or one or more other accessory ingredients, and then, if necessary and/or desirable, dividing, shaping and/or packaging the product into a desired single- or multi-dose unit.

[0621] A pharmaceutical composition in accordance with the invention may be prepared, packaged, and/or sold in bulk, as a single unit dose, and/or as a plurality of single unit doses. As used herein, a “unit dose” is discrete amount of the pharmaceutical composition comprising a predetermined amount of the active ingredient. The amount of the active ingredient is generally equal to the dosage of the active ingredient which would be administered to a subject and/or a convenient fraction of such a dosage such as, for example, one-half or one-third of such a dosage.

[0622] Relative amounts of the active ingredient, the pharmaceutically acceptable excipient, and/or any additional ingredients in a pharmaceutical composition in accordance with the invention will vary, depending upon the identity, size, and/or condition of the subject treated and further depending upon the route by which the composition is to be administered. By way of example, the composition may comprise between 0.1% and 100%, e.g., between 0.5 and 50%, between 1-30%, between 5-80%, at least 80% (w/w) active ingredient

### Formulations

[0623] The polynucleotides, modified nucleic acid, enhanced modified RNA and ribonucleic acid of the invention can be formulated using one or more excipients to: (1) increase stability; (2) increase cell transfection; (3) permit the sustained or delayed release (e.g., from a depot formulation of the modified nucleic acids, enhanced modified RNA or ribonucleic acids); (4) alter the biodistribution (e.g., target the modified nucleic acids, enhanced modified RNA or ribonucleic acids to specific tissues or cell types); (5) increase the translation of encoded protein in vivo; and/or (6) alter the release profile of encoded protein in vivo. In addition to traditional excipients such as any and all solvents, dispersion media, diluents, or other liquid vehicles, dispersion or suspension aids, surface active agents, isotonic agents, thickening or emulsifying agents, preservatives, excipients of the present invention can include, without limitation, lipidoids, liposomes, lipid nanoparticles, polymers, lipoplexes, core-shell nanoparticles, peptides, proteins, cells transfected with polynucleotides, modified nucleic acid, enhanced modified RNA and ribonucleic acid (e.g., for transplantation into a subject), hyaluronidase, nanoparticle mimics and combinations thereof.

[0624] Accordingly, the formulations of the invention can include one or more excipients, each in an amount that together increases the stability of the polynucleotide, modified nucleic acid, enhanced modified RNA or ribonucleic acid, increases cell transfection by the polynucleotides, modified nucleic acid, enhanced modified RNA or ribonucleic acid, increases the expression of polynucleotides, modified nucleic acid, enhanced modified RNA or ribonucleic acid encoded protein, and/or alters the release profile of the polynucleotides, modified nucleic acid, enhanced modified RNA or ribonucleic acid encoded proteins. Further, the polynucleotides, modified nucleic acid, enhanced modified RNA or ribonucleic acid of the present invention may be formulated using self-assembled nucleic acid nanoparticles.

[0625] Formulations of the pharmaceutical compositions described herein may be prepared by any method known or hereafter developed in the art of pharmacology. In general, such preparatory methods include the step of associating the active ingredient with an excipient and/or one or more other accessory ingredients.

[0626] The polynucleotides, modified nucleic acid, enhanced modified RNA and ribonucleic acid of the invention may be formulated for delivery in the tissues and/or organs of a subject. Organs may include, but are not limited to, the heart, lung, brain, liver, basal ganglia, brain stem medulla, midbrain, pons, cerebellum, cerebral cortex, hypothalamus, eye, pituitary, thyroid, parathyroid, esophagus, thymus, adrenal glands, appendix, bladder, gallbladder, intestines (e.g., large intestine and small intestine), kidney, pancreas, spleen, stomach, skin, prostate, testes, ovaries, uterus, adrenal glands, anus, bronchi, ears, esophagus, genitals, larynx (voice box), lymph nodes, meninges, mouth, nose, parathyroid glands, pituitary gland, rectum, salivary glands, spinal cord, thymus gland, tongue, trachea, ureters, urethra, colon. Tissues may include, but are not limited to, heart valves, bone, vein, middle ear, muscle (cardiac, smooth or skeletal) cartilage, tendon or ligaments. As a non-limiting example, the polynucleotides, modified nucleic acid, enhanced modified RNA and ribonucleic acid may be formulated in a lipid nanoparticle and delivered to an organ such as, but not limited, to the liver, spleen, kidney or lung. In another non-limiting example, the polynucleotides, modified nucleic acids, enhanced modified RNA and ribonucleic acid may be formulated in a lipid nanoparticle comprising the cationic lipid DLin-KC2-DMA and delivered to an organ such as, but not limited to, the liver, spleen, kidney or lung.

[0627] A pharmaceutical composition in accordance with the present disclosure may be prepared, packaged, and/or sold in bulk, as a single unit dose, and/or as a plurality of single unit doses. As used herein, a “unit dose” refers to a discrete amount of the pharmaceutical composition comprising a predetermined amount of the active ingredient. The amount of the active ingredient may generally be equal to the dosage of the active ingredient which would be administered to a subject and/or a convenient fraction of such a dosage including, but not limited to, one-half or one-third of such a dosage.

[0628] Relative amounts of the active ingredient, the pharmaceutically acceptable excipient, and/or any additional ingredients in a pharmaceutical composition in accordance with the present disclosure may vary, depending upon the identity, size, and/or condition of the subject being treated and further depending upon the route by which the composition is to be administered. For example, the composition may comprise between 0.1% and 99% (w/w) of the active ingredient.

[0629] In some embodiments, the modified mRNA formulations described herein may contain at least one modified mRNA. The formulations may contain 1, 2, 3, 4 or 5 modified mRNA. In one embodiment the formulation may contain modified mRNA encoding proteins selected from categories such as, but not limited to, human proteins, veterinary proteins, bacterial proteins, biological proteins, antibodies, immunogenic proteins, therapeutic peptides and proteins, secreted proteins, plasma membrane proteins, cytoplasmic and cytoskeletal proteins, intrancellular membrane bound proteins, nuclear proteins, proteins associated with human disease and/or proteins associated with non-human diseases. In one embodiment, the formulation contains at least three modified mRNA encoding proteins. In one embodiment, the formulation contains at least five modified mRNA encoding proteins.

[0630] The use of modified polynucleotides in the fields of antibodies, viruses, veterinary applications and a variety of in vivo settings have been explored and are disclosed in, for example, co-pending and co-owned U.S. Provisional Patent Application No. 61/618,862, filed Apr. 2, 2012, entitled Modified Polynucleotides for the Production of Biologics; U.S. Provisional Patent Application No. 61/681,645, filed Aug. 10, 2012, entitled Modified Polynucleotides for the Production of Biologics; U.S. Provisional Patent Application No. 61/737,130, filed Dec. 14, 2012, entitled Modified Polynucleotides for the Production of Biologics; U.S. Provisional Patent Application No. 61/618,866, filed Apr. 2, 2012, entitled Modified Polynucleotides for the Production of Antibodies; U.S. Provisional Patent Application No. 61/681,647, filed Aug. 10, 2012, entitled Modified Polynucleotides for the Production of Antibodies; U.S. Provisional Patent Application No. 61/737,134, filed Dec. 14, 2012, entitled Modified Polynucleotides for the Production of Antibodies; U.S. Provisional Patent Application No. 61/618,868, filed Apr. 2, 2012, entitled Modified Polynucleotides for the Production of Vaccines; U.S. Provisional Patent Application No. 61/681,648, filed Aug. 10, 2012, entitled Modified Polynucleotides for the Production of Vaccines; U.S. Provisional Patent Application No. 61/737,135, filed Dec. 14, 2012, entitled Modified Polynucleotides for the Production of Vaccines; U.S. Provisional Patent Application No. 61/618,870, filed Apr. 2, 2012, entitled Modified Polynucleotides for the Production of Therapeutic Proteins and Peptides; U.S. Provisional Patent Application No. 61/681,649, filed Aug. 10, 2012, entitled Modified Polynucleotides for the Production of Therapeutic Proteins and Peptides; U.S. Provisional Patent Application No. 61/737,139, filed Dec. 14, 2012, Modified Polynucleotides for the Production of Therapeutic Proteins and Peptides; U.S. Provisional Patent Application No. 61/618,873, filed Apr. 2, 2012, entitled Modified Polynucleotides for the Production of Secreted Proteins; U.S. Provisional Patent Application No. 61/681,650, filed Aug. 10, 2012, entitled Modified Polynucleotides for the Production of Secreted Proteins; U.S. Provisional Patent Application No. 61/737,147, filed Dec. 14, 2012, entitled Modified Polynucleotides for the Production of Secreted Proteins; U.S. Provisional Patent Application No. 61/618,878, filed Apr. 2, 2012, entitled Modified Polynucleotides for the Production of Plasma Membrane Proteins; U.S. Provisional Patent Application No. 61/681,654, filed Aug. 10, 2012, entitled Modified Polynucleotides for the Production of Plasma Membrane Proteins; U.S. Provisional Patent Application No. 61/737,152, filed Dec. 14, 2012, entitled Modified Polynucleotides for the Production of Plasma Membrane Proteins; U.S. Provisional Patent Application No. 61/618,885, filed Apr. 2, 2012, entitled Modified Polynucleotides for the Production of Cytoplasmic and Cytoskeletal Proteins; U.S. Provisional Patent Application No. 61/681,658, filed Aug. 10, 2012, entitled Modified Polynucleotides for the Production of Cytoplasmic and Cytoskeletal Proteins; U.S. Provisional Patent Application No. 61/737,155, filed Dec. 14, 2012, entitled Modified Polynucleotides for the Production of Cytoplasmic and Cytoskeletal Proteins; U.S. Provisional Patent Application No. 61/618,896, filed Apr. 2, 2012, entitled Modified Polynucleotides for the Production of Intracellular Membrane Bound Proteins; U.S. Provisional Patent Application No. 61/668,157, filed Jul. 5, 2012, entitled Modified Polynucleotides for the Production of Intracellular Membrane Bound Proteins; U.S. Provisional Patent Application No. 61/681,661, filed Aug. 10, 2012, entitled Modified Polynucleotides for the Production of Intracellular Membrane Bound Proteins; U.S. Provisional Patent Application No. 61/737,160, filed Dec. 14, 2012, entitled Modified Polynucleotides for the Production of Intracellular Membrane Bound Proteins; U.S. Provisional Patent Application No. 61/618,911, filed Apr. 2, 2012, entitled Modified Polynucleotides for the Production of Nuclear Proteins; U.S. Provisional Patent Application No. 61/681,667, filed Aug. 10, 2012, entitled Modified Polynucleotides for the Production of Nuclear Proteins; U.S. Provisional Patent Application No. 61/737,168, filed Dec. 14, 2012, entitled Modified Polynucleotides for the Production of Nuclear Proteins; U.S. Provisional Patent Application No. 61/618,922, filed Apr. 2, 2012, entitled Modified Polynucleotides for the Production of Proteins; U.S. Provisional Patent Application No. 61/681,675, filed Aug. 10, 2012, entitled Modified Polynucleotides for the Production of Proteins; U.S. Provisional Patent Application No. 61/737,174, filed Dec. 14, 2012, entitled Modified Polynucleotides for the Production of Proteins; U.S. Provisional Patent Application No. 61/618,935, filed Apr. 2, 2012, entitled Modified Polynucleotides for the Production of Proteins Associated with Human Disease; U.S. Provisional Patent Application No. 61/681,687, filed Aug. 10, 2012, entitled Modified Polynucleotides for the Production of Proteins Associated with Human Disease; U.S. Provisional Patent Application No. 61/737,184, filed Dec. 14, 2012, entitled Modified Polynucleotides for the Production of Proteins Associated with Human Disease; U.S. Provisional Patent Application No. 61/618,945, filed Apr. 2, 2012, entitled Modified Polynucleotides for the Production of Proteins Associated with Human Disease; U.S. Provisional Patent Application No. 61/681,696, filed Aug. 10, 2012, entitled Modified Polynucleotides for the Production of Proteins Associated with Human Disease; U.S. Provisional Patent Application No. 61/737,191, filed Dec. 14, 2012, entitled Modified Polynucleotides for the Production of Proteins Associated with Human Disease; U.S. Provisional Patent Application No. 61/618,953, filed Apr. 2, 2012, entitled Modified Polynucleotides for the Production of Proteins Associated with Human Disease; U.S. Provisional Patent Application No. 61/681,704, filed Aug. 10, 2012, entitled Modified Polynucleotides for the Production of Proteins Associated with Human Disease; U.S. Provisional Patent Application No. 61/737,203, filed Dec. 14, 2012, entitled Modified Polynucleotides for the Production of Proteins Associated with Human Disease; U.S. Provisional Patent Application No. 61/681,720, filed Aug. 10, 2012, entitled Modified Polynucleotides for the Production of Cosmetic Proteins and Peptides; U.S. Provisional Patent Application No. 61/737,213, filed Dec. 14, 2012, entitled Modified Polynucleotides for the Production of Cosmetic Proteins and Peptides; U.S. Provisional Patent Application No. 61/681,742, filed Aug. 10, 2012, entitled Modified Polynucleotides for the Production of Oncology-Related Proteins and Peptides; International Application No PCT/US2013/030062, filed Mar. 9, 2013, entitled Modified Polynucleotides for the Production of Biologics and Proteins Associated with Human Disease; U.S. patent application Ser. No. 13/791,922, filed Mar. 9, 2013, entitled Modified Polynucleotides for the Production of Biologics and Proteins Associated with Human Disease; International Application No PCT/US2013/030063, filed Mar. 9, 2013, entitled Modified Polynucleotides; International Application No. PCT/US2013/030064, entitled Modified Polynucleotides for the Production of Secreted Proteins; U.S. patent application Ser. No. 13/791,921, filed Mar. 9, 2013, entitled Modified Polynucleotides for the Production of Secreted Proteins; International Application No PCT/US2013/030059, filed Mar. 9, 2013, entitled Modified Polynucleotides for the Production of Membrane Proteins; International Application No. PCT/US2013/030066, filed Mar. 9, 2013, entitled Modified Polynucleotides for the Production of Cytoplasmic and Cytoskeletal Proteins; International Application No. PCT/US2013/030067, filed Mar. 9, 2013, entitled Modified Polynucleotides for the Production of Nuclear Proteins; International Application No. PCT/US2013/030060, filed Mar. 9, 2013, entitled Modified Polynucleotides for the Production of Proteins; International Application No. PCT/US2013/030061, filed Mar. 9, 2013, entitled Modified Polynucleotides for the Production of Proteins Associated with Human Disease; U.S. patent application Ser. No. 13/791,910, filed Mar. 9, 2013, entitled Modified Polynucleotides for the Production of Proteins Associated with Human Disease; International Application No. PCT/US2013/030068, filed Mar. 9, 2013, entitled Modified Polynucleotides for the Production of Cosmetic Proteins and Peptides; and International Application No. PCT/US2013/030070, filed Mar. 9, 2013, entitled Modified Polynucleotides for the Production of Oncology-Related Proteins and Peptides; International Patent Application No. PCT/US2013/031821, filed Mar. 15, 2013, entitled In Vivo Production of Proteins; the contents of each of which are herein incorporated by reference in their entireties.

[0631] Pharmaceutical formulations may additionally comprise a pharmaceutically acceptable excipient, which, as used herein, includes, but is not limited to, any and all solvents, dispersion media, diluents, or other liquid vehicles, dispersion or suspension aids, surface active agents, isotonic agents, thickening or emulsifying agents, preservatives, and the like, as suited to the particular dosage form desired. Various excipients for formulating pharmaceutical compositions and techniques for preparing the composition are known in the art (see Remington: The Science and Practice of Pharmacy, 21^{st} Edition, A. R. Gennaro, Lippincott, Williams & Wilkins, Baltimore, Md., 2006; incorporated herein by reference). The use of a conventional excipient medium may be contemplated within the scope of the present disclosure, except insofar as any conventional excipient medium may be incompatible with a substance or its derivatives, such as by producing any undesirable biological effect or otherwise interacting in a deleterious manner with any other component(s) of the pharmaceutical composition.

[0632] In some embodiments, the particle size of the lipid nanoparticle may be increased and/or decreased. The change in particle size may be able to help counter biological reaction such as, but not limited to, inflammation or may increase the biological effect of the modified mRNA delivered to mammals.

[0633] Pharmaceutically acceptable excipients used in the manufacture of pharmaceutical compositions include, but are not limited to, inert diluents, surface active agents and/or emulsifiers, preservatives, buffering agents, lubricating agents, and/or oils. Such excipients may optionally be included in the pharmaceutical formulations of the invention

### Lipidoid

[0634] The synthesis of lipidoids has been extensively described and formulations containing these compounds are particularly suited for delivery of polynucleotides, modified nucleic acids, enhanced modified RNA and ribonucleic acids (see Mahon et al., Bioconjug Chem. 2010 21:1448-1454; Schroeder et al., J Intern Med. 2010 267:9-21; Akinc et al., Nat Biotechnol. 2008 26:561-569; Love et al., Proc Natl Acad Sci USA. 2010 107:1864-1869; Siegwart et al., Proc Natl Acad Sci USA. 2011 108:12996-3001; all of which are incorporated herein in their entireties).

[0635] While these lipidoids have been used to effectively deliver double stranded small interfering RNA molecules in rodents and non-human primates (see Akinc et al., Nat Biotechnol. 2008 26:561-569; Frank-Kamenetsky et al., Proc Natl Acad Sci USA. 2008 105:11915-11920; Akinc et al., Mol Ther. 2009 17:872-879; Love et al., Proc Natl Acad Sci USA. 2010 107:1864-1869; Leuschner et al., Nat Biotechnol. 2011 29:1005-1010; all of which is incorporated herein in their entirety), the present disclosure describes their formulation and use in delivering single stranded polynucleotide, modified nucleic acids, enhanced modified RNA and ribonucleic acids. Complexes, micelles, liposomes or particles can be prepared containing these lipidoids and therefore, can result in an effective delivery of the polynucleotides, modified nucleic acids, enhanced modified RNA and ribonucleic acids, as judged by the production of an encoded protein, following the injection of a lipidoid formulation via localized and/or systemic routes of administration. Lipidoid complexes of polynucleotides, modified nucleic acids, enhanced modified RNA and ribonucleic acids can be administered by various means including, but not limited to, intravenous, intramuscular, or subcutaneous routes.

[0636] In vivo delivery of nucleic acids may be affected by many parameters, including, but not limited to, the formulation composition, nature of particle PEGylation, degree of loading, oligonucleotide to lipid ratio, and biophysical parameters such as particle size (Akinc et al., Mol Ther. 2009 17:872-879; herein incorporated by reference in its entirety). As an example, small changes in the anchor chain length of poly(ethylene glycol) (PEG) lipids may result in significant effects on in vivo efficacy. Formulations with the different lipidoids, including, but not limited to penta[3-(1-laurylaminopropionyl)]-triethylenetetramine hydrochloride (TETA-5LAP; aka 98N12-5, see Murugaiah et al., Analytical Biochemistry, 401:61 (2010)), C12-200 (including derivatives and variants), and MD1, can be tested for in vivo activity.

[0637] The lipidoid referred to herein as “98N12-5” is disclosed by Akinc et al., Mol Ther. 2009 17:872-879 and is incorporated by reference in its entirety.

[0638] The lipidoid referred to herein as “C12-200” is disclosed by Love et al., Proc Natl Acad Sci USA. 2010 107:1864-1869 and Liu and Huang, Molecular Therapy. 2010 669-670; both of which are herein incorporated by reference in their entirety. The lipidoid formulations can include particles comprising either 3 or 4 or more components in addition to polynucleotide, modified nucleic acids, enhanced modified RNA and ribonucleic acids. As an example, formulations with certain lipidoids, include, but are not limited to, 98N12-5 and may contain 42% lipidoid, 48% cholesterol and 10% PEG (C14 alkyl chain length). As another example, formulations with certain lipidoids, include, but are not limited to, C12-200 and may contain 50% lipidoid, 10% disteroylphosphatidyl choline, 38.5% cholesterol, and 1.5% PEG-DMG.

[0639] In one embodiment, a modified nucleic acids, enhanced modified RNA or ribonucleic acids formulated with a lipidoid for systemic intravenous administration can target the liver. For example, a final optimized intravenous formulation using modified nucleic acids, enhanced modified RNA or ribonucleic acids, and comprising a lipid molar composition of 42% 98N12-5, 48% cholesterol, and 10% PEG-lipid with a final weight ratio of about 7.5 to 1 total lipid to polynucleotide, modified nucleic acids, enhanced modified RNA or ribonucleic acids, and a C14 alkyl chain length on the PEG lipid, with a mean particle size of roughly 50-60 nm, can result in the distribution of the formulation to be greater than 90% to the liver. (see, Akinc et al., Mol Ther. 2009 17:872-879; herein incorporated in its entirety). In another example, an intravenous formulation using a C12-200 (see U.S. provisional application 61/175,770 and published international application WO2010129709, each of which is herein incorporated by reference in their entirety) lipidoid may have a molar ratio of 50/10/38.5/1.5 of C12-200/disteroylphosphatidyl choline/cholesterol/PEG-DMG, with a weight ratio of 7 to 1 total lipid to polynucleotide, modified nucleic acids, enhanced modified RNA or ribonucleic acids, and a mean particle size of 80 nm may be effective to deliver polynucleotides, modified nucleic acids, enhanced modified RNA or ribonucleic acids to hepatocytes (see, Love et al., Proc Natl Acad Sci USA. 2010 107:1864-1869 herein incorporated by reference). In another embodiment, an MD1 lipidoid-containing formulation may be used to effectively deliver polynucleotides, modified nucleic acids, enhanced modified RNA or ribonucleic acids to hepatocytes in vivo. The characteristics of optimized lipidoid formulations for intramuscular or subcutaneous routes may vary significantly depending on the target cell type and the ability of formulations to diffuse through the extracellular matrix into the blood stream. While a particle size of less than 150 nm may be desired for effective hepatocyte delivery due to the size of the endothelial fenestrae (see, Akinc et al., Mol Ther. 2009 17:872-879 herein incorporated by reference), use of a lipidoid-formulated polynucleotides, modified nucleic acids, enhanced modified RNA or ribonucleic acids to deliver the formulation to other cells types including, but not limited to, endothelial cells, myeloid cells, and muscle cells may not be similarly size-limited. Use of lipidoid formulations to deliver siRNA in vivo to other non-hepatocyte cells such as myeloid cells and endothelium has been reported (see Akinc et al., Nat Biotechnol. 2008 26:561-569; Leuschner et al., Nat Biotechnol. 2011 29:1005-1010; Cho et al. Adv. Funct. Mater. 2009 19:3112-3118; 8^{th} International Judah Folkman Conference, Cambridge, Mass. Oct. 8-9, 2010 herein incorporated by reference in its entirety). Effective delivery to myeloid cells, such as monocytes, lipidoid formulations may have a similar component molar ratio. Different ratios of lipidoids and other components including, but not limited to, disteroylphosphatidyl choline, cholesterol and PEG-DMG, may be used to optimize the formulation of the polynucleotides, modified nucleic acids, enhanced modified RNA or ribonucleic acids for delivery to different cell types including, but not limited to, hepatocytes, myeloid cells, muscle cells, etc. For example, the component molar ratio may include, but is not limited to, 50% C12-200, 10% disteroylphosphatidyl choline, 38.5% cholesterol, and %1.5 PEG-DMG (see Leuschner et al., Nat Biotechnol 2011 29:1005-1010; herein incorporated by reference in its entirety). The use of lipidoid formulations for the localized delivery of nucleic acids to cells (such as, but not limited to, adipose cells and muscle cells) via either subcutaneous or intramuscular delivery, may not require all of the formulation components desired for systemic delivery, and as such may comprise only the lipidoid and the polynucleotides, modified nucleic acids, enhanced modified RNA or ribonucleic acids.

[0640] Combinations of different lipidoids may be used to improve the efficacy of polynucleotides, modified nucleic acids, enhanced modified RNA or ribonucleic acids directed protein production as the lipidoids may be able to increase cell transfection by the polynucleotides, modified nucleic acid, or modified nucleic acids, enhanced modified RNA or ribonucleic acids; and/or increase the translation of encoded protein (see Whitehead et al., Mol. Ther. 2011, 19:1688-1694, herein incorporated by reference in its entirety).

### Liposomes, Lipoplexes, and Lipid Nanoparticles

[0641] The polynucleotides, modified nucleic acids, enhanced modified RNA or ribonucleic acids of the invention can be formulated using one or more liposomes, lipoplexes, or lipid nanoparticles. In one embodiment, pharmaceutical compositions of polynucleotides, modified nucleic acids, enhanced modified RNA or ribonucleic acids include liposomes. Liposomes are artificially-prepared vesicles which may primarily be composed of a lipid bilayer and may be used as a delivery vehicle for the administration of nutrients and pharmaceutical formulations. Liposomes can be of different sizes such as, but not limited to, a multilamellar vesicle (MLV) which may be hundreds of nanometers in diameter and may contain a series of concentric bilayers separated by narrow aqueous compartments, a small unicellular vesicle (SUV) which may be smaller than 50 nm in diameter, and a large unilamellar vesicle (LUV) which may be between 50 and 500 nm in diameter. Liposome design may include, but is not limited to, opsonins or ligands in order to improve the attachment of liposomes to unhealthy tissue or to activate events such as, but not limited to, endocytosis. Liposomes may contain a low or a high pH in order to improve the delivery of the pharmaceutical formulations.

[0642] The formation of liposomes may depend on the physicochemical characteristics such as, but not limited to, the pharmaceutical formulation entrapped and the liposomal ingredients, the nature of the medium in which the lipid vesicles are dispersed, the effective concentration of the entrapped substance and its potential toxicity, any additional processes involved during the application and/or delivery of the vesicles, the optimization size, polydispersity and the shelf-life of the vesicles for the intended application, and the batch-to-batch reproducibility and possibility of large-scale production of safe and efficient liposomal products.

[0643] In one embodiment, pharmaceutical compositions described herein may include, without limitation, liposomes such as those formed from 1,2-dioleyloxy-N,N-dimethylaminopropane (DODMA) liposomes, DiLa2 liposomes from Marina Biotech (Bothell, Wash.), 1,2-dilinoleyloxy-3-dimethylaminopropane (DLin-DMA), 2,2-dilinoleyl-4-(2-dimethylaminoethyl)-[1,3]-dioxolane (DLin-KC2-DMA), and MC3 (US20100324120; herein incorporated by reference in its entirety) and liposomes which may deliver small molecule drugs such as, but not limited to, DOXIL® from Janssen Biotech, Inc. (Horsham, Pa.). In one embodiment, pharmaceutical compositions described herein may include, without limitation, liposomes such as those formed from the synthesis of stabilized plasmid-lipid particles (SPLP) or stabilized nucleic acid lipid particle (SNALP) that have been previously described and shown to be suitable for oligonucleotide delivery in vitro and in vivo (see Wheeler et al. Gene Therapy. 1999 6:271-281; Zhang et al. Gene Therapy. 1999 6:1438-1447; Jeffs et al. Pharm Res. 2005 22:362-372; Morrissey et al., Nat Biotechnol. 2005 2:1002-1007; Zimmermann et al., Nature. 2006 441:111-114; Heyes et al. J Contr Rel. 2005 107:276-287; Semple et al. Nature Biotech. 2010 28:172-176; Judge et al. J Clin Invest. 2009 119:661-673; deFougerolles Hum Gene Ther. 2008 19:125-132; all of which are incorporated herein in their entireties.) The original manufacture method by Wheeler et al. was a detergent dialysis method, which was later improved by Jeffs et al. and is referred to as the spontaneous vesicle formation method. The liposome formulations are composed of 3 to 4 lipid components in addition to the polynucleotides, modified nucleic acids, enhanced modified RNA or ribonucleic acids. As an example a liposome can contain, but is not limited to, 55% cholesterol, 20% disteroylphosphatidyl choline (DSPC), 10% PEG-S-DSG, and 15% 1,2-dioleyloxy-N,N-dimethylaminopropane (DODMA), as described by Jeffs et al. As another example, certain liposome formulations may contain, but are not limited to, 48% cholesterol, 20% DSPC, 2% PEG-c-DMA, and 30% cationic lipid, where the cationic lipid can be 1,2-distearloxy-N,N-dimethylaminopropane (DSDMA), DODMA, DLin-DMA, or 1,2-dilinolenyloxy-3-dimethylaminopropane (DLenDMA), as described by Heyes et al.

[0644] In one embodiment, pharmaceutical compositions may include liposomes which may be formed to deliver polynucleotides, modified nucleic acids, enhanced modified RNA and ribonucleic acids which may encode at least one immunogen. The polynucleotides, modified nucleic acids, enhanced modified RNA and ribonucleic acids may be encapsulated by the liposome and/or it may be contained in an aqueous core which may then be encapsulated by the liposome (see International Pub. Nos. WO2012031046, WO2012031043, WO2012030901 and WO2012006378; each of which is herein incorporated by reference in their entirety). In another polynucleotides, embodiment, the modified nucleic acids, enhanced modified RNA and ribonucleic acids which may encode an immunogen may be formulated in a cationic oil-in-water emulsion where the emulsion particle comprises an oil core and a cationic lipid which can interact with the polynucleotides, modified nucleic acids, enhanced modified RNA and ribonucleic acids anchoring the molecule to the emulsion particle (see International Pub. No. WO2012006380). In yet another embodiment, the lipid formulation may include at least cationic lipid, a lipid which may enhance transfection and a least one lipid which contains a hydrophilic head group linked to a lipid moiety (International Pub. No. WO2011076807 and U.S. Pub. No. 20110200582; each of which is herein incorporated by reference in their entirety). In another embodiment, the polynucleotides, modified nucleic acids, enhanced modified RNA or ribonucleic acids encoding an immunogen may be formulated in a lipid vesicle which may have crosslinks between functionalized lipid bilayers (see U.S. Pub. No. 20120177724, herein incorporated by reference in its entirety).

[0645] In one embodiment, the polynucleotides, modified nucleic acids, enhanced modified RNA or ribonucleic acids may be formulated in a lipid vesicle which may have crosslinks between functionalized lipid bilayers.

[0646] In one embodiment, the polynucleotides, modified nucleic acids, enhanced modified RNA or ribonucleic acids may be formulated in a lipid-polycation complex. The formation of the lipid-polycation complex may be accomplished by methods known in the art and/or as described in U.S. Pub. No. 20120178702, herein incorporated by reference in its entirety. As a non-limiting example, the polycation may include a cationic peptide or a polypeptide such as, but not limited to, polylysine, polyornithine and/or polyarginine. In another embodiment, the polynucleotide, modified nucleic acids, enhanced modified RNA or ribonucleic acids may be formulated in a lipid-polycation complex which may further include a neutral lipid such as, but not limited to, cholesterol or dioleoyl phosphatidylethanolamine (DOPE).

[0647] The liposome formulation may be influenced by, but not limited to, the selection of the cationic lipid component, the degree of cationic lipid saturation, the nature of the PEGylation, ratio of all components and biophysical parameters such as size. In one example by Semple et al. (Semple et al. Nature Biotech. 2010 28:172-176), the liposome formulation was composed of 57.1% cationic lipid, 7.1% dipalmitoylphosphatidylcholine, 34.3% cholesterol, and 1.4% PEG-c-DMA. As another example, changing the composition of the cationic lipid could more effectively deliver siRNA to various antigen presenting cells (Basha et al. Mol Ther. 2011 19:2186-2200; herein incorporated by reference in its entirety).

[0648] In some embodiments, the ratio of PEG in the LNP formulations may be increased or decreased and/or the carbon chain length of the PEG lipid may be modified from C14 to C18 to alter the pharmacokinetics and/or biodistribution of the LNP formulations. As a non-limiting example, LNP formulations may contain 1-5% of the lipid molar ratio of PEG-c-DOMG as compared to the cationic lipid, DSPC and cholesterol. In another embodiment the PEG-c-DOMG may be replaced with a PEG lipid such as, but not limited to, PEG-DSG (1,2-Distearoyl-sn-glycerol, methoxypolyethylene glycol) or PEG-DPG (1,2-Dipalmitoyl-sn-glycerol, methoxypolyethylene glycol). The cationic lipid may be selected from any lipid known in the art such as, but not limited to, DLin-MC3-DMA, DLin-DMA, C12-200 and DLin-KC2-DMA.

[0649] In one embodiment, the cationic lipid may be selected from, but not limited to, a cationic lipid described in International Publication Nos. WO2012040184, WO2011153120, WO2011149733, WO2011090965, WO2011043913, WO2011022460, WO2012061259, WO2012054365, WO2012044638, WO2010080724, WO201021865 and WO2008103276, U.S. Pat. Nos. 7,893,302 and 7,404,969 and US Patent Publication No. US20100036115; each of which is herein incorporated by reference in their entirety. In another embodiment, the cationic lipid may be selected from, but not limited to, formula A described in International Publication Nos. WO2012040184, WO2011153120, WO2011149733, WO2011090965, WO2011043913, WO2011022460, WO2012061259, WO2012054365 and WO2012044638; each of which is herein incorporated by reference in their entirety. In yet another embodiment, the cationic lipid may be selected from, but not limited to, formula CLI-CLXXIX of International Publication No. WO2008103276, formula CLI-CLXXIX of U.S. Pat. No. 7,893,302, formula CLI-CLXXXXII of U.S. Pat. No. 7,404,969 and formula I-VI of US Patent Publication No. US20100036115; each of which is herein incorporated by reference in their entirety. As a non-limiting example, the cationic lipid may be selected from (20Z,23Z)—N,N-dimethylnonacosa-20,23-dien-10-amine, (17Z,20Z)—N,N-dimemylhexacosa-17,20-dien-9-amine, (1 Z, 19Z)-N5N˜dimethylpentacosa˜16,19-dien-8-amine, (13Z,16Z)—N,N-dimethyldocosa-13J16-dien-5-amine, (12Z,15Z)-NJN-dimethylhenicosa-12,15-dien-4-amine, (14Z,17Z)—N,N-dimethyltricosa-14,17-dien-6-amine, (15Z,18Z)—N,N-dimethyltetracosa-15,18-dien-7-amine, (18Z,21Z)—N,N-dimethylheptacosa-18,21-dien-10-amine, (15Z,18Z)—N,N-dimethyltetracosa-15,18-dien-5-amine, (14Z,17Z)—N,N-dimethyltricosa-14,17-dien-4-amine, (19Z,22Z)—N,N-dimeihyloctacosa-19,22-dien-9-amine, (18Z,21 Z)—N,N-dimethylheptacosa-18,21-dien-8-amine, (17Z,20Z)—N,N-dimethylhexacosa-17,20-dien-7-amine, (16Z;19Z)—N,N-dimethylpentacosa-16,19-dien-6-amine, (22Z,25Z)—N,N-dimethylhentriaconta-22,25-dien-10-amine, (21 Z,24Z)—N;N-dimethyltriaconta-21,24-dien-9-amine, (18Z)—N,N-dimetylheptacos-18-en-10-amine, (17Z)—N,N-dimethylhexacos-17-en-9-amine, (19Z,22Z)-NJN-dimethyloctacosa-19,22-dien-7-amine, N,N-dimethylheptacosan-10-amine, (20Z,23Z)—N-ethyl-N-methylnonacosa-20J23-dien-10-amine, 1-[(112,14Z)-1-nonylicosa-11,14-dien-1-yl]pyrrolidine, (20Z)—N,N-dimethylheptacos-20-en-10-amine, (15Z)—N,N-dimethyl eptacos-15-en-10-amine, (14Z)—N,N-dimethylnonacos-14-en-10-amine, (17Z)—N,N-dimethylnonacos-17-en-10-amine, (24Z)—N,N-dimethyltritriacont-24-en-10-amine, (20Z)—N,N-dimethylnonacos-20-en-1-amine, (22Z)—N,N-dimethylhentriacont-22-en-10-amine, (16Z)—N,N-dimethylpentacos-16-en-8-amine, (12Z,15Z)—N,N-dimethyl-2-nonylhenico sa-12, 15-dien-1-amine, (13Z,16Z)—N,N-dimethyl-3-nonyldocosa-13,16-dien-1-amine, N,N-dimethyl-1-[(1 S,2R)-2-octylcyclopropyl]eptadecan-8-amine, 1-[(1S,2R)-2-hexylcyclopropyl]-N,N-dimethylnonadecan-10-amine, N,N-dimethyl-1-[(1S,2R)-2-octylcyclopropyl]nonadecan-10-amine, N,N-dimethyl-21-[(1S,2R)-2-octylcyclopropyl]henicosan-10-amine, N,N-dimethyl-1-[(1S,2S)-2-{[(1R,2R)-2-pentylcyclopropyl]methyl}cyclopropyl]nonadecan-10-amine, N,N-dimethyl-1-[(1 S,2R)-2-octylcyclopropyl]hexadecan-8-amine, N,N-dimethyH-[(1R,2S)-2-undecyIcyclopropyl]tetradecan-5-amine, N,N-dimethyl-3-{7-[(1S,2R)-2-octylcyclopropyl]heptyl}dodecan-1-amine, 1-[(1R,2S)-2-heptylcyclopropy 1]-N,N-dimethyloctadecan-9-amine, 1-[(1S,2R)-2-decylcyclopropyl]-N,N-dimethylpentadecan-6-amine, N,N-dimethyl-1-[(1S,2R)-2-octylcyclopropyl]pentadecan-8-amine, R—N,N-dimethyl-1-[(9Z,12Z)-octadeca-9,12-dien-1-yloxy]-3-(octyloxy)propan-2-amine, S—N,N-dimethyl-1-[(9Z,12Z)-octadeca-9,12-dien-1-yloxy]-3-(octyloxy)propan-2-amine, 1-{2-[(9Z,12Z)-octadeca-9,12-dien-1-yloxy]-1-[(octyloxy) methyl]ethyl}pyrrolidine, (2S)—N,N-dimethyl-1-[(9Z,12Z)-octadeca-9,12-dien-1-yloxy]-3-[(5Z)-oct-5-en-1-yloxy]propan-2-amine, 1-{2-[(9Z,12Z)-octadeca-9,12-dien-1-yloxy]-1-[(octyloxy) methyl]ethyl}azetidine, (2S)-1-(hexyloxy)-N,N-dimethyl-3-[(9Z,12Z)-octadeca-9,12-dien-1-yloxy]propan-2-amine, (2S)-1-(heptyloxy)-N,N-dimethyl-3-[(9Z,12Z)-octadeca-9,12-dien-1-yloxy]propan-2-amine, N,N-dimethyl-1-(nonyloxy)-3-[(9Z,12Z)-octadeca-9,12-dien-1-yloxy]propan-2-amine, N,N-dimethyl-1-[(9Z)-octadec-9-en-1-yloxy]-3-(octyloxy)propan-2-amine (Compound 9); (2 S)—N,N-dimethyl-1-[(6Z,9Z,12Z)-octadeca-6,9,12-trien-1-yloxy]-3-(octyloxy)propan-2-amine, (2 S)-1-[(11Z,14Z)-icosa-11,14-dien-1-yloxy]-N,N-dimethyl-3-(pentyloxy)propan-2-amine, (2 S)-1-(hexyloxy)-3-[(11Z,14Z)-icosa-11,14-dien-1-yloxy]-N,N-dimethylpropan-2-amine, 1-[(11Z,14Z)-icosa-11,14-dien-1-yloxy]-N,N-dimethyl-3-(octyloxy)propan-2-amine, 1-[(13Z,16Z)-docosa-13,16-dien-1-yloxy]-N,N-dimethyl-3-(octyloxy)propan-2-amine, (2S)-1-[(13Z,16Z)-docosa-13,16-dien-1-yloxy]-3-(hexyloxy)-N,N-dimethylpropan-2-amine, (2 S)-1-[(13Z)-docos-13-en-1-yloxy]-3-(hexyloxy)-N,N-dimethylpropan-2-amine, 1-[(13Z)-docos-13-en-1-yloxy]-N,N-dimethyl-3-(octyloxy)propan-2-amine, 1-[(9Z)-hexadec-9-en-1-yloxy]-N,N-dimethyl-3-(octyloxy)propan-2-amine, (2R)—N,N-dimethyl-H(1-metoyloctyl)oxy]-3-[(9Z,12Z)-octadeca-9,12-dien-1-yloxy]propan-2-amine, (2R)-1-[(3,7-dimethyloctyl)oxy]-N,N-dimethyl-3-[(9Z,12Z)-octadeca-9,12-dien-1-yloxy]propan-2-amine, N,N-dimethyl-1-(octyloxy)-3-({8-[(1S,2S)-2-{[(1R,2R)-2-pentylcyclopropyl]methyl}cyclopropyl]octyl}oxy)propan-2-amine, N,N-dimethyl-1-{[8-(2-oclylcyclopropyl)octyl]oxy}-3-(octyloxy)propan-2-amine and (11E,20Z,23Z)—N;N-dimethylnonacosa-11,20,2-trien-10-amine or a pharmaceutically acceptable salt or stereoisomer thereof.

[0650] In one embodiment, the cationic lipid may be synthesized by methods known in the art and/or as described in International Publication Nos. WO2012040184, WO2011153120, WO2011149733, WO2011090965, WO2011043913, WO2011022460, WO2012061259, WO2012054365, WO2012044638, WO2010080724 and WO201021865; each of which is herein incorporated by reference in their entirety.

[0651] In one embodiment, the LNP formulation may contain PEG-c-DOMG 3% lipid molar ratio. In another embodiment, the LNP formulation may contain PEG-c-DOMG 1.5% lipid molar ratio.

[0652] In one embodiment, the LNP formulation may contain PEG-DMG 2000 (1,2-dimyristoyl-sn-glycero-3-phophoethanolamine-N-[methoxy(polyethylene glycol)-2000). In one embodiment, the LNP formulation may contain PEG-DMG 2000, a cationic lipid known in the art and at least one other component. In another embodiment, the LNP formulation may contain PEG-DMG 2000, a cationic lipid known in the art, DSPC and cholesterol. As a non-limiting example, the LNP formulation may contain PEG-DMG 2000, DLin-DMA, DSPC and cholesterol. As another non-limiting example the LNP formulation may contain PEG-DMG 2000, DLin-DMA, DSPC and cholesterol in a molar ratio of 2:40:10:48 (see Geall et al., Nonviral delivery of self-amplifying RNA vaccines, PNAS 2012; PMID: 22908294).

[0653] In one embodiment, the LNP formulation may be formulated by the methods described in International Publication Nos. WO2011127255 or WO2008103276, each of which is herein incorporated by reference in their entirety. As a non-limiting example, modified RNA described herein may be encapsulated in LNP formulations as described in WO2011127255 and/or WO2008103276; each of which is herein incorporated by reference in their entirety.

[0654] In one embodiment, LNP formulations described herein may comprise a polycationic composition. As a non-limiting example, the polycationic composition may be selected from formula 1-60 of US Patent Publication No. US20050222064; herein incorporated by reference in its entirety. In another embodiment, the LNP formulations comprising a polycationic composition may be used for the delivery of the modified RNA described herein in vivo and/or in vitro.

[0655] In one embodiment, the LNP formulations described herein may additionally comprise a permeability enhancer molecule. Non-limiting permeability enhancer molecules are described in US Patent Publication No. US20050222064; herein incorporated by reference in its entirety.

[0656] In one embodiment, the pharmaceutical compositions may be formulated in liposomes such as, but not limited to, DiLa2 liposomes (Marina Biotech, Bothell, Wash.), SMARTICLES® (Marina Biotech, Bothell, Wash.), neutral DOPC (1,2-dioleoyl-sn-glycero-3-phosphocholine) based liposomes (e.g., siRNA delivery for ovarian cancer (Landen et al. Cancer Biology & Therapy 2006 5(12)1708-1713)) and hyaluronan-coated liposomes (Quiet Therapeutics, Israel).

[0657] Lipid nanoparticle formulations may be improved by replacing the cationic lipid with a biodegradable cationic lipid which is known as a rapidly eliminated lipid nanoparticle (reLNP). Ionizable cationic lipids, such as, but not limited to, DLinDMA, DLin-KC2-DMA, and DLin-MC3-DMA, have been shown to accumulate in plasma and tissues over time and may be a potential source of toxicity. The rapid metabolism of the rapidly eliminated lipids can improve the tolerability and therapeutic index of the lipid nanoparticles by an order of magnitude from a 1 mg/kg dose to a 10 mg/kg dose in rat. Inclusion of an enzymatically degraded ester linkage can improve the degradation and metabolism profile of the cationic component, while still maintaining the activity of the reLNP formulation. The ester linkage can be internally located within the lipid chain or it may be terminally located at the terminal end of the lipid chain. The internal ester linkage may replace any carbon in the lipid chain.

[0658] In one embodiment, the internal ester linkage may be located on either side of the saturated carbon. Non-limiting examples of reLNPs include,

[chemical structure]

[0659] In one embodiment, an immune response may be elicited by delivering a lipid nanoparticle which may include a nanospecies, a polymer and an immunogen. (U.S. Publication No. 20120189700 and International Publication No. WO2012099805; each of which is herein incorporated by reference in their entirety). The polymer may encapsulate the nanospecies or partially encapsulate the nanospecies. The immunogen may be a recombinant protein, a modified RNA described herein. In one embodiment, the lipid nanoparticle may be formulated for use in a vaccine such as, but not limited to, against a pathogen.

[0660] Lipid nanoparticles may be engineered to alter the surface properties of particles so the lipid nanoparticles may penetrate the mucosal barrier. Mucus is located on mucosal tissue such as, but not limited to, oral (e.g., the buccal and esophageal membranes and tonsil tissue), ophthalmic, gastrointestinal (e.g., stomach, small intestine, large intestine, colon, rectum), nasal, respiratory (e.g., nasal, pharyngeal, tracheal and bronchial membranes), genital (e.g., vaginal, cervical and urethral membranes). Nanoparticles larger than 10-200 nm which are preferred for higher drug encapsulation efficiency and the ability to provide the sustained delivery of a wide array of drugs have been thought to be too large to rapidly diffuse through mucosal barriers. Mucus is continuously secreted, shed, discarded or digested and recycled so most of the trapped particles may be removed from the mucosal tissue within seconds or within a few hours. Large polymeric nanoparticles (200 nm-500 nm in diameter) which have been coated densely with a low molecular weight polyethylene glycol (PEG) diffused through mucus only 4 to 6-fold lower than the same particles diffusing in water (Lai et al. PNAS 2007 104(5):1482-487; Lai et al. Adv Drug Deliv Rev. 2009 61(2): 158-171; each of which is herein incorporated by reference in their entirety). The transport of nanoparticles may be determined using rates of permeation and/or fluorescent microscopy techniques including, but not limited to, fluorescence recovery after photobleaching (FRAP) and high resolution multiple particle tracking (MPT).

[0661] The lipid nanoparticle engineered to penetrate mucus may comprise a polymeric material (i.e. a polymeric core) and/or a polymer-vitamin conjugate and/or a tri-block co-polymer. The polymeric material may include, but is not limited to, polyamines, polyethers, polyamides, polyesters, polycarbamates, polyureas, polycarbonates, poly(styrenes), polyimides, polysulfones, polyurethanes, polyacetylenes, polyethylenes, polyethyeneimines, polyisocyanates, polyacrylates, polymethacrylates, polyacrylonitriles, and polyarylates. The polymeric material may be biodegradable and/or biocompatible. Non-limiting examples of specific polymers include poly(caprolactone) (PCL), ethylene vinyl acetate polymer (EVA), poly(lactic acid) (PLA), poly(L-lactic acid) (PLLA), poly(glycolic acid) (PGA), poly(lactic acid-co-glycolic acid) (PLGA), poly(L-lactic acid-co-glycolic acid) (PLLGA), poly(D,L-lactide) (PDLA), poly(L-lactide) (PLLA), poly(D,L-lactide-co-caprolactone), poly(D,L-lactide-co-caprolactone-co-glycolide), poly(D,L-lactide-co-PEO-co-D,L-lactide), poly(D,L-lactide-co-PPO-co-D,L-lactide), polyalkyl cyanoacralate, polyurethane, poly-L-lysine (PLL), hydroxypropyl methacrylate (HPMA), polyethyleneglycol, poly-L-glutamic acid, poly(hydroxy acids), polyanhydrides, polyorthoesters, poly(ester amides), polyamides, poly(ester ethers), polycarbonates, polyalkylenes such as polyethylene and polypropylene, polyalkylene glycols such as poly(ethylene glycol) (PEG), polyalkylene oxides (PEO), polyalkylene terephthalates such as poly(ethylene terephthalate), polyvinyl alcohols (PVA), polyvinyl ethers, polyvinyl esters such as poly(vinyl acetate), polyvinyl halides such as poly(vinyl chloride) (PVC), polyvinylpyrrolidone, polysiloxanes, polystyrene (PS), polyurethanes, derivatized celluloses such as alkyl celluloses, hydroxyalkyl celluloses, cellulose ethers, cellulose esters, nitro celluloses, hydroxypropylcellulose, carboxymethylcellulose, polymers of acrylic acids, such as poly(methyl(meth)acrylate) (PMMA), poly(ethyl(meth)acrylate), poly(butyl(meth)acrylate), poly(isobutyl(meth)acrylate), poly(hexyl(meth)acrylate), poly(isodecyl(meth)acrylate), poly(lauryl(meth)acrylate), poly(phenyl(meth)acrylate), poly(methyl acrylate), poly(isopropyl acrylate), poly(isobutyl acrylate), poly(octadecyl acrylate) and copolymers and mixtures thereof, polydioxanone and its copolymers, polyhydroxyalkanoates, polypropylene fumarate, polyoxymethylene, poloxamers, poly(ortho)esters, poly(butyric acid), poly(valeric acid), poly(lactide-co-caprolactone), and trimethylene carbonate, polyvinylpyrrolidone. The lipid nanoparticle may be coated or associated with a co-polymer such as, but not limited to, a block co-polymer, and (poly(ethylene glycol))-(poly(propylene oxide))-(poly(ethylene glycol)) triblock copolymer (see US Publication 20120121718 and US Publication 20100003337; each of which is herein incorporated by reference in their entirety). The co-polymer may be a polymer that is generally regarded as safe (GRAS) and the formation of the lipid nanoparticle may be in such a way that no new chemical entities are created. For example, the lipid nanoparticle may comprise poloxamers coating PLGA nanoparticles without forming new chemical entities which are still able to rapidly penetrate human mucus (Yang et al. Angew. Chem. Int. Ed. 2011 50:2597-2600; herein incorporated by reference in its entirety).

[0662] The vitamin of the polymer-vitamin conjugate may be vitamin E. The vitamin portion of the conjugate may be substituted with other suitable components such as, but not limited to, vitamin A, vitamin E, other vitamins, cholesterol, a hydrophobic moiety, or a hydrophobic component of other surfactants (e.g., sterol chains, fatty acids, hydrocarbon chains and alkylene oxide chains).

[0663] The lipid nanoparticle engineered to penetrate mucus may include surface altering agents such as, but not limited to, polynucleotides, modified nucleic acids, enhanced modified RNA, ribonucleic acids, anionic protein (e.g., bovine serum albumin), surfactants (e.g., cationic surfactants such as for example dimethyldioctadecyl-ammonium bromide), sugars or sugar derivatives (e.g., cyclodextrin), nucleic acids, polymers (e.g., heparin, polyethylene glycol and poloxamer), mucolytic agents (e.g., N-acetylcysteine, mugwort, bromelain, papain, clerodendrum, acetylcysteine, bromhexine, carbocisteine, eprazinone, mesna, ambroxol, sobrerol, domiodol, letosteine, stepronin, tiopronin, gelsolin, thymosin β4 dornase alfa, neltenexine, erdosteine) and various DNases including rhDNase. The surface altering agent may be embedded or enmeshed in the particle's surface or disposed (e.g., by coating, adsorption, covalent linkage, or other process) on the surface of the lipid nanoparticle. (see US Publication 20100215580 and US Publication 20080166414; each of which is herein incorporated by reference in their entirety).

[0664] The mucus penetrating lipid nanoparticles may comprise at least one polynucleotide, modified nucleic acids, enhanced modified RNA or ribonucleic acids described herein. The modified nucleic acids, enhanced modified RNA or ribonucleic acids may be encapsulated in the lipid nanoparticle and/or disposed on the surface of the particle. The polynucleotide, modified nucleic acids, enhanced modified RNA or ribonucleic acids may be covalently coupled to the lipid nanoparticle. Formulations of mucus penetrating lipid nanoparticles may comprise a plurality of nanoparticles. Further, the formulations may contain particles which may interact with the mucus and alter the structural and/or adhesive properties of the surrounding mucus to decrease mucoadhesion which may increase the delivery of the mucus penetrating lipid nanoparticles to the mucosal tissue.

[0665] In one embodiment, the polynucleotide, modified nucleic acids, enhanced modified RNA or ribonucleic acids is formulated as a lipoplex, such as, without limitation, the ATUPLEX™ system, the DACC system, the DBTC system and other siRNA-lipoplex technology from Silence Therapeutics (London, United Kingdom), STEMFECT™ from STEMGENT® (Cambridge, Mass.), and polyethylenimine (PEI) or protamine-based targeted and non-targeted delivery of nucleic acids (Aleku et al. Cancer Res. 2008 68:9788-9798; Strumberg et al. Int J Clin Pharmacol Ther 2012 50:76-78; Santel et al., Gene Ther 2006 13:1222-1234; Santel et al., Gene Ther 2006 13:1360-1370; Gutbier et al., Pulm Pharmacol. Ther. 2010 23:334-344; Kaufmann et al. Microvasc Res 2010 80:286-293 Weide et al. J Immunother. 2009 32:498-507; Weide et al. J Immunother. 2008 31:180-188; Pascolo Expert Opin. Biol. Ther. 4:1285-1294; Fotin-Mleczek et al., 2011 J. Immunother. 34:1-15; Song et al., Nature Biotechnol. 2005, 23:709-717; Peer et al., Proc Natl Acad Sci USA. 2007 6; 104:4095-4100; deFougerolles Hum Gene Ther. 2008 19:125-132; all of which are incorporated herein by reference in its entirety).

[0666] In one embodiment such formulations may also be constructed or compositions altered such that they passively or actively are directed to different cell types in vivo, including but not limited to hepatocytes, immune cells, tumor cells, endothelial cells, antigen presenting cells, and leukocytes (Akinc et al. Mol Ther. 2010 18:1357-1364; Song et al., Nat Biotechnol. 2005 23:709-717; Judge et al., J Clin Invest. 2009 119:661-673; Kaufmann et al., Microvasc Res 2010 80:286-293; Santel et al., Gene Ther 2006 13:1222-1234; Santel et al., Gene Ther 2006 13:1360-1370; Gutbier et al., Pulm Pharmacol. Ther. 2010 23:334-344; Basha et al., Mol. Ther. 2011 19:2186-2200; Fenske and Cullis, Expert Opin Drug Deliv. 2008 5:25-44; Peer et al., Science. 2008 319:627-630; Peer and Lieberman, Gene Ther. 2011 18:1127-1133; all of which are incorporated herein by reference in its entirety). One example of passive targeting of formulations to liver cells includes the DLin-DMA, DLin-KC2-DMA and MC3-based lipid nanoparticle formulations which have been shown to bind to apolipoprotein E and promote binding and uptake of these formulations into hepatocytes in vivo (Akinc et al. Mol Ther. 2010 18:1357-1364; herein incorporated by reference in its entirety). Formulations can also be selectively targeted through expression of different ligands on their surface as exemplified by, but not limited by, folate, transferrin, N-acetylgalactosamine (GalNAc), and antibody targeted approaches (Kolhatkar et al., Curr Drug Discov Technol. 2011 8:197-206; Musacchio and Torchilin, Front Biosci. 2011 16:1388-1412; Yu et al., Mol Membr Biol. 2010 27:286-298; Patil et al., Crit Rev Ther Drug Carrier Syst. 2008 25:1-61; Benoit et al., Biomacromolecules. 2011 12:2708-2714 Zhao et al., Expert Opin Drug Deliv. 2008 5:309-319; Akinc et al., Mol Ther. 2010 18:1357-1364; Srinivasan et al., Methods Mol Biol. 2012 820:105-116; Ben-Arie et al., Methods Mol Biol. 2012 757:497-507; Peer 2010 J Control Release. 20:63-68; Peer et al., Proc Natl Acad Sci USA. 2007 104:4095-4100; Kim et al., Methods Mol Biol. 2011 721:339-353; Subramanya et al., Mol Ther. 2010 18:2028-2037; Song et al., Nat Biotechnol. 2005 23:709-717; Peer et al., Science. 2008 319:627-630; Peer and Lieberman, Gene Ther. 2011 18:1127-1133; all of which are incorporated herein by reference in its entirety).

[0667] In one embodiment, the polynucleotide, modified nucleic acids, enhanced modified RNA or ribonucleic acids is formulated as a solid lipid nanoparticle. A solid lipid nanoparticle (SLN) may be spherical with an average diameter between 10 to 1000 nm. SLN possess a solid lipid core matrix that can solubilize lipophilic molecules and may be stabilized with surfactants and/or emulsifiers. In a further embodiment, the lipid nanoparticle may be a self-assembly lipid-polymer nanoparticle (see Zhang et al., ACS Nano, 2008, 2 (8), pp 1696-1702; herein incorporated by reference in its entirety).

[0668] Liposomes, lipoplexes, or lipid nanoparticles may be used to improve the efficacy of polynucleotides, modified nucleic acids, enhanced modified RNA or ribonucleic acids directed protein production as these formulations may be able to increase cell transfection by the polynucleotides, modified nucleic acids, enhanced modified RNA or ribonucleic acids; and/or increase the translation of encoded protein. One such example involves the use of lipid encapsulation to enable the effective systemic delivery of polyplex plasmid DNA (Heyes et al., Mol Ther. 2007 15:713-720; herein incorporated by reference in its entirety). The liposomes, lipoplexes, or lipid nanoparticles may also be used to increase the stability of the polynucleotides, modified nucleic acids, enhanced modified RNA or ribonucleic acids.

[0669] In one embodiment, the polynucleotide, modified nucleic acids, enhanced modified RNA or ribonucleic acids of the present invention can be formulated for controlled release and/or targeted delivery. As used herein, “controlled release” refers to a pharmaceutical composition or compound release profile that conforms to a particular pattern of release to effect a therapeutic outcome. In one embodiment, the polynucleotide, modified nucleic acids, enhanced modified RNA or ribonucleic acids may be encapsulated into a delivery agent described herein and/or known in the art for controlled release and/or targeted delivery. As used herein, the term “encapsulate” means to enclose, surround or encase. As it relates to the formulation of the compounds of the invention, encapsulation may be substantial, complete or partial. The term “substantially encapsulated” means that at least greater than 50, 60, 70, 80, 85, 90, 95, 96, 97, 98, 99, 99.9, 99.9 or greater than 99.999% of the pharmaceutical composition or compound of the invention may be enclosed, surrounded or encased within the delivery agent. “Partially encapsulation” means that less than 10, 10, 20, 30, 40 50 or less of the pharmaceutical composition or compound of the invention may be enclosed, surrounded or encased within the delivery agent. Advantageously, encapsulation may be determined by measuring the escape or the activity of the pharmaceutical composition or compound of the invention using fluorescence and/or electron micrograph. For example, at least 1, 5, 10, 20, 30, 40, 50, 60, 70, 80, 85, 90, 95, 96, 97, 98, 99, 99.9, 99.99 or greater than 99.99% of the pharmaceutical composition or compound of the invention are encapsulated in the delivery agent.

[0670] In another embodiment, the polynucleotides, modified nucleic acids, enhanced modified RNA or ribonucleic acids may be encapsulated into a lipid nanoparticle or a rapidly eliminating lipid nanoparticle and the lipid nanoparticles or a rapidly eliminating lipid nanoparticle may then be encapsulated into a polymer, hydrogel and/or surgical sealant described herein and/or known in the art. As a non-limiting example, the polymer, hydrogel or surgical sealant may be PLGA, ethylene vinyl acetate (EVAc), poloxamer, GELSITE® (Nanotherapeutics, Inc. Alachua, Fla.), HYLENEX® (Halozyme Therapeutics, San Diego Calif.), surgical sealants such as fibrinogen polymers (Ethicon Inc. Cornelia, Ga.), TISSELL® (Baxter International, Inc Deerfield, Ill.), PEG-based sealants, and COSEAL® (Baxter International, Inc Deerfield, Ill.).

[0671] In one embodiment, the lipid nanoparticle may be encapsulated into any polymer or hydrogel known in the art which may form a gel when injected into a subject. As another non-limiting example, the lipid nanoparticle may be encapsulated into a polymer matrix which may be biodegradable.

[0672] In one embodiment, the polynucleotides, modified nucleic acids, enhanced modified RNA or ribonucleic acids formulation for controlled release and/or targeted delivery may also include at least one controlled release coating. Controlled release coatings include, but are not limited to, OPADRY®, polyvinylpyrrolidone/vinyl acetate copolymer, polyvinylpyrrolidone, hydroxypropyl methylcellulose, hydroxypropyl cellulose, hydroxyethyl cellulose, EUDRAGIT RED, EUDRAGIT RS® and cellulose derivatives such as ethylcellulose aqueous dispersions (AQUACOAT® and SURELEASE®).

[0673] In one embodiment, the controlled release and/or targeted delivery formulation may comprise at least one degradable polyester which may contain polycationic side chains. Degradeable polyesters include, but are not limited to, poly(serine ester), poly(L-lactide-co-L-lysine), poly(4-hydroxy-L-proline ester), and combinations thereof. In another embodiment, the degradable polyesters may include a PEG conjugation to form a PEGylated polymer.

[0674] In one embodiment, the modified nucleic acids, enhanced modified RNA or ribonucleic acids of the present invention may be encapsulated in a therapeutic nanoparticle. Therapeutic nanoparticles may be formulated by methods described herein and known in the art such as, but not limited to, International Pub Nos. WO2010005740, WO2010030763, WO2010005721, WO2010005723, WO2012054923, US Pub. Nos. US20110262491, US20100104645, US20100087337, US20100068285, US20110274759, US20100068286, and U.S. Pat. No. 8,206,747; each of which is herein incorporated by reference in their entirety. In another embodiment, therapeutic polymer nanoparticles may be identified by the methods described in US Pub No. US20120140790, herein incorporated by reference in its entirety.

[0675] In one embodiment, the therapeutic nanoparticle may be formulated for sustained release. As used herein, “sustained release” refers to a pharmaceutical composition or compound that conforms to a release rate over a specific period of time. The period of time may include, but is not limited to, hours, days, weeks, months and years. As a non-limiting example, the sustained release nanoparticle may comprise a polymer and a therapeutic agent such as, but not limited to, the polynucleotides, modified nucleic acids, enhanced modified RNA or ribonucleic acids of the present invention (see International Pub No. 2010075072 and US Pub No. US20100216804 and US20110217377, each of which is herein incorporated by reference in their entirety).

[0676] In one embodiment, the therapeutic nanoparticles may be formulated to be target specific. As a non-limiting example, the therapeutic nanoparticles may include a corticosteroid (see International Pub. No. WO2011084518). In one embodiment, the therapeutic nanoparticles may be formulated to be cancer specific. As a non-limiting example, the therapeutic nanoparticles may be formulated in nanoparticles described in International Pub No. WO2008121949, WO2010005726, WO2010005725, WO2011084521 and US Pub No. US20100069426, US20120004293 and US20100104655, each of which is herein incorporated by reference in their entirety.

[0677] In one embodiment, the nanoparticles of the present invention may comprise a polymeric matrix. As a non-limiting example, the nanoparticle may comprise two or more polymers such as, but not limited to, polyethylenes, polycarbonates, polyanhydrides, polyhydroxyacids, polypropylfumerates, polycaprolactones, polyamides, polyacetals, polyethers, polyesters, poly(orthoesters), polycyanoacrylates, polyvinyl alcohols, polyurethanes, polyphosphazenes, polyacrylates, polymethacrylates, polycyanoacrylates, polyureas, polystyrenes, polyamines, polylysine, poly(ethylene imine), poly(serine ester), poly(L-lactide-co-L-lysine), poly(4-hydroxy-L-proline ester) or combinations thereof.

[0678] In one embodiment, the diblock copolymer may include PEG in combination with a polymer such as, but not limited to, polyethylenes, polycarbonates, polyanhydrides, polyhydroxyacids, polypropylfumerates, polycaprolactones, polyamides, polyacetals, polyethers, polyesters, poly(orthoesters), polycyanoacrylates, polyvinyl alcohols, polyurethanes, polyphosphazenes, polyacrylates, polymethacrylates, polycyanoacrylates, polyureas, polystyrenes, polyamines, polylysine, poly(ethylene imine), poly(serine ester), poly(L-lactide-co-L-lysine), poly(4-hydroxy-L-proline ester) or combinations thereof.

[0679] In one embodiment, the therapeutic nanoparticle comprises a diblock copolymer. As a non-limiting example the therapeutic nanoparticle comprises a PLGA-PEG block copolymer (see US Pub. No. US20120004293 and U.S. Pat. No. 8,236,330, each of which is herein incorporated by reference in their entirety). In another non-limiting example, the therapeutic nanoparticle is a stealth nanoparticle comprising a diblock copolymer of PEG and PLA or PEG and PLGA (see U.S. Pat. No. 8,246,968, herein incorporated by reference in its entirety).

[0680] In one embodiment, the therapeutic nanoparticle may comprise at least one acrylic polymer. Acrylic polymers include but are not limited to, acrylic acid, methacrylic acid, acrylic acid and methacrylic acid copolymers, methyl methacrylate copolymers, ethoxyethyl methacrylates, cyanoethyl methacrylate, amino alkyl methacrylate copolymer, poly(acrylic acid), poly(methacrylic acid), polycyanoacrylates and combinations thereof.

[0681] In one embodiment, the therapeutic nanoparticles may comprise at least one cationic polymer described herein and/or known in the art.

[0682] In one embodiment, the therapeutic nanoparticles may comprise at least one amine-containing polymer such as, but not limited to polylysine, polyethylene imine, poly(amidoamine) dendrimers and combinations thereof.

[0683] In one embodiment, the therapeutic nanoparticles may comprise at least one degradable polyester which may contain polycationic side chains. Degradeable polyesters include, but are not limited to, poly(serine ester), poly(L-lactide-co-L-lysine), poly(4-hydroxy-L-proline ester), and combinations thereof. In another embodiment, the degradable polyesters may include a PEG conjugation to form a PEGylated polymer.

[0684] In another embodiment, the therapeutic nanoparticle may include a conjugation of at least one targeting ligand.

[0685] In one embodiment, the therapeutic nanoparticle may be formulated in an aqueous solution which may be used to target cancer (see International Pub No. WO2011084513 and US Pub No. US20110294717, each of which is herein incorporated by reference in their entirety).

[0686] In one embodiment, the polynucleotides, modified nucleic acids, enhanced modified RNA or ribonucleic acids may be encapsulated in, linked to and/or associated with synthetic nanocarriers. The synthetic nanocarriers may be formulated using methods known in the art and/or described herein. As a non-limiting example, the synthetic nanocarriers may be formulated by the methods described in International Pub Nos. WO2010005740, WO2010030763 and US Pub. Nos. US20110262491, US20100104645 and US20100087337, each of which is herein incorporated by reference in their entirety. In another embodiment, the synthetic nanocarrier formulations may be lyophilized by methods described in International Pub. No. WO2011072218 and U.S. Pat. No. 8,211,473; each of which is herein incorporated by reference in their entirety.

[0687] In one embodiment, the synthetic nanocarriers may contain reactive groups to release the modified nucleic acids, enhanced modified RNA or ribonucleic acids described herein (see International Pub. No. WO20120952552 and US Pub No. US20120171229, each of which is herein incorporated by reference in their entirety).

[0688] In one embodiment, the synthetic nanocarriers may contain an immunostimulatory agent to enhance the immune response from delivery of the synthetic nanocarrier. As a non-limiting example, the synthetic nanocarrier may comprise a Th1 immunostimulatory agent which may enhance a Th1-based response of the immune system (see International Pub No. WO2010123569 and US Pub. No. US20110223201, each of which is herein incorporated by reference in its entirety).

[0689] In one embodiment, the synthetic nanocarriers may be formulated for targeted release. In one embodiment, the synthetic nanocarrier is formulated to release the polynucleotides, modified nucleic acids, enhanced modified RNA or ribonucleic acids at a specified pH and/or after a desired time interval. As a non-limiting example, the synthetic nanoparticle may be formulated to release the modified nucleic acids, enhanced modified RNA or ribonucleic acids after 24 hours and/or at a pH of 4.5 (see International Pub. Nos. WO2010138193 and WO2010138194 and US Pub Nos. US20110020388 and US20110027217, each of which is herein incorporated by reference in their entirety).

[0690] In one embodiment, the synthetic nanocarriers may be formulated for controlled and/or sustained release of the polynucleotides, modified nucleic acids, enhanced modified RNA or ribonucleic acids described herein. As a non-limiting example, the synthetic nanocarriers for sustained release may be formulated by methods known in the art, described herein and/or as described in International Pub No. WO2010138192 and US Pub No. 20100303850, each of which is herein incorporated by reference in their entirety.

[0691] In one embodiment, the synthetic nanocarrier may be formulated for use as a vaccine. In one embodiment, the synthetic nanocarrier may encapsulate at least one modified nucleic acids, enhanced modified RNA or ribonucleic acids which encodes at least one antigen. As a non-limiting example, the synthetic nanocarrier may include at least one antigen and an excipient for a vaccine dosage form (see International Pub No. WO2011150264 and US Pub No. US20110293723, each of which is herein incorporated by reference in their entirety). As another non-limiting example, a vaccine dosage form may include at least two synthetic nanocarriers with the same or different antigens and an excipient (see International Pub No. WO2011150249 and US Pub No. US20110293701, each of which is herein incorporated by reference in their entirety). The vaccine dosage form may be selected by methods described herein, known in the art and/or described in International Pub No. WO2011150258 and US Pub No. US20120027806, each of which is herein incorporated by reference in their entirety).

[0692] In one embodiment, the synthetic nanocarrier may comprise at least one polynucleotide, modified nucleic acids, enhanced modified RNA or ribonucleic acids which encodes at least one adjuvant. In another embodiment, the synthetic nanocarrier may comprise at least one modified nucleic acids, enhanced modified RNA or ribonucleic acids and an adjuvant. As a non-limiting example, the synthetic nanocarrier comprising and adjuvant may be formulated by the methods described in International Pub No. WO2011150240 and US Pub No. US20110293700, each of which is herein incorporated by reference in its entirety.

[0693] In one embodiment, the synthetic nanocarrier may encapsulate at least one polynucleotide, modified nucleic acids, enhanced modified RNA or ribonucleic acids which encodes a peptide, fragment or region from a virus. As a non-limiting example, the synthetic nanocarrier may include, but is not limited to, the nanocarriers described in International Pub No. WO2012024621, WO201202629, WO2012024632 and US Pub No. US20120064110, US20120058153 and US20120058154, each of which is herein incorporated by reference in their entirety.

### Polymers, Biodegradable Nanoparticles, and Core-Shell Nanoparticles

[0694] The polynucleotides, modified nucleic acids, enhanced modified RNA or ribonucleic acids of the invention can be formulated using natural and/or synthetic polymers. Non-limiting examples of polymers which may be used for delivery include, but are not limited to, Dynamic POLYCONJUGATE™ formulations from MIRUS® Bio (Madison, Wis.) and Roche Madison (Madison, Wis.), PHASERX™ polymer formulations such as, without limitation, SMARTT POLYMER TECHNOLOGY™ (Seattle, Wash.), DMRI/DOPE, poloxamer, VAXFECTIN® adjuvant from Vical (San Diego, Calif.), chitosan, cyclodextrin from Calando Pharmaceuticals (Pasadena, Calif.), dendrimers and poly(lactic-co-glycolic acid) (PLGA) polymers, RONDEL™ (RNAi/Oligonucleotide Nanoparticle Delivery) polymers (Arrowhead Research Corporation, Pasadena, Calif.) and pH responsive co-block polymers such as, but not limited to, PHASERX™ (Seattle, Wash.).

[0695] A non-limiting example of PLGA formulations include, but are not limited to, PLGA injectable depots (e.g., ELIGARD® which is formed by dissolving PLGA in 66% N-methyl-2-pyrrolidone (NMP) and the remainder being aqueous solvent and leuprolide. Once injected, the PLGA and leuprolide peptide precipitates into the subcutaneous space).

[0696] Many of these polymer approaches have demonstrated efficacy in delivering oligonucleotides in vivo into the cell cytoplasm (reviewed in deFougerolles Hum Gene Ther. 2008 19:125-132; herein incorporated by reference in its entirety). Two polymer approaches that have yielded robust in vivo delivery of nucleic acids, in this case with small interfering RNA (siRNA), are dynamic polyconjugates and cyclodextrin-based nanoparticles. The first of these delivery approaches uses dynamic polyconjugates and has been shown in vivo in mice to effectively deliver siRNA and silence endogenous target mRNA in hepatocytes (Rozema et al., Proc Natl Acad Sci USA. 2007 104:12982-12887). This particular approach is a multicomponent polymer system whose key features include a membrane-active polymer to which nucleic acid, in this case siRNA, is covalently coupled via a disulfide bond and where both PEG (for charge masking) and N-acetylgalactosamine (for hepatocyte targeting) groups are linked via pH-sensitive bonds (Rozema et al., Proc Natl Acad Sci USA. 2007 104:12982-12887). On binding to the hepatocyte and entry into the endosome, the polymer complex disassembles in the low-pH environment, with the polymer exposing its positive charge, leading to endosomal escape and cytoplasmic release of the siRNA from the polymer. Through replacement of the N-acetylgalactosamine group with a mannose group, it was shown one could alter targeting from asialoglycoprotein receptor-expressing hepatocytes to sinusoidal endothelium and Kupffer cells. Another polymer approach involves using transferrin-targeted cyclodextrin-containing polycation nanoparticles. These nanoparticles have demonstrated targeted silencing of the EWS-FLI1 gene product in transferrin receptor-expressing Ewing's sarcoma tumor cells (Hu-Lieskovan et al., Cancer Res. 2005 65: 8984-8982) and siRNA formulated in these nanoparticles was well tolerated in non-human primates (Heidel et al., Proc Natl Acad Sci USA 2007 104:5715-21). Both of these delivery strategies incorporate rational approaches using both targeted delivery and endosomal escape mechanisms.

[0697] The polymer formulation can permit the sustained or delayed release of polynucleotides, modified nucleic acids, enhanced modified RNA or ribonucleic acids (e.g., following intramuscular or subcutaneous injection). The altered release profile for the polynucleotides, modified nucleic acids, enhanced modified RNA or ribonucleic acids can result in, for example, translation of an encoded protein over an extended period of time. The polymer formulation may also be used to increase the stability of the polynucleotide, modified nucleic acids, enhanced modified RNA or ribonucleic acids. Biodegradable polymers have been previously used to protect nucleic acids other than modified nucleic acids, enhanced modified RNA or ribonucleic acids from degradation and been shown to result in sustained release of payloads in vivo (Rozema et al., Proc Natl Acad Sci USA. 2007 104:12982-12887; Sullivan et al., Expert Opin Drug Deliv. 2010 7:1433-1446; Convertine et al., Biomacromolecules. 2010 Oct. 1; Chu et al., Acc Chem Res. 2012 Jan. 13; Manganiello et al., Biomaterials. 2012 33:2301-2309; Benoit et al., Biomacromolecules. 2011 12:2708-2714; Singha et al., Nucleic Acid Ther. 2011 2:133-147; deFougerolles Hum Gene Ther. 2008 19:125-132; Schaffert and Wagner, Gene Ther. 2008 16:1131-1138; Chaturvedi et al., Expert Opin Drug Deliv. 2011 8:1455-1468; Davis, Mol Pharm. 2009 6:659-668; Davis, Nature 2010 464:1067-1070; herein incorporated by reference in its entirety).

[0698] In one embodiment, the pharmaceutical compositions may be sustained release formulations. In a further embodiment, the sustained release formulations may be for subcutaneous delivery. Sustained release formulations may include, but are not limited to, PLGA microspheres, ethylene vinyl acetate (EVAc), poloxamer, GELSITE® (Nanotherapeutics, Inc. Alachua, Fla.), HYLENEX® (Halozyme Therapeutics, San Diego Calif.), surgical sealants such as fibrinogen polymers (Ethicon Inc. Cornelia, Ga.), TISSELL® (Baxter International, Inc Deerfield, Ill.), PEG-based sealants, and COSEAL® (Baxter International, Inc Deerfield, Ill.).

[0699] As a non-limiting example modified mRNA may be formulated in PLGA microspheres by preparing the PLGA microspheres with tunable release rates (e.g., days and weeks) and encapsulating the modified mRNA in the PLGA microspheres while maintaining the integrity of the modified mRNA during the encapsulation process. EVAc are non-biodegradeable, biocompatible polymers which are used extensively in pre-clinical sustained release implant applications (e.g., extended release products Ocusert a pilocarpine ophthalmic insert for glaucoma or progestasert a sustained release progesterone intrauterine device; transdermal delivery systems Testoderm, Duragesic and Selegiline; catheters). Poloxamer F-407 NF is a hydrophilic, non-ionic surfactant triblock copolymer of polyoxyethylene-polyoxypropylene-polyoxyethylene having a low viscosity at temperatures less than 5° C. and forms a solid gel at temperatures greater than 15° C. PEG-based surgical sealants comprise two synthetic PEG components mixed in a delivery device which can be prepared in one minute, seals in 3 minutes and is reabsorbed within 30 days. GELSITE® and natural polymers are capable of in-situ gelation at the site of administration. They have been shown to interact with protein and peptide therapeutic candidates through ionic interaction to provide a stabilizing effect.

[0700] Polymer formulations can also be selectively targeted through expression of different ligands as exemplified by, but not limited by, folate, transferrin, and N-acetylgalactosamine (GalNAc) (Benoit et al., Biomacromolecules. 2011 12:2708-2714; Rozema et al., Proc Natl Acad Sci USA. 2007 104:12982-12887; Davis, Mol Pharm. 2009 6:659-668; Davis, Nature 2010 464:1067-1070; each of which is herein incorporated by reference in its entirety).

[0701] The polynucleotides, modified nucleic acids, enhanced modified RNA or ribonucleic acids of the invention may be formulated with or in a polymeric compound. The polymer may include at least one polymer such as, but not limited to, polyethenes, polyethylene glycol (PEG), poly(l-lysine)(PLL), PEG grafted to PLL, cationic lipopolymer, biodegradable cationic lipopolymer, polyethyleneimine (PEI), cross-linked branched poly(alkylene imines), a polyamine derivative, a modified poloxamer, a biodegradable polymer, biodegradable block copolymer, biodegradable random copolymer, biodegradable polyester copolymer, biodegradable polyester block copolymer, biodegradable polyester block random copolymer, linear biodegradable copolymer, poly[α-(4-aminobutyl)-L-glycolic acid) (PAGA), biodegradable cross-linked cationic multi-block copolymers, polycarbonates, polyanhydrides, polyhydroxyacids, polypropylfumerates, polycaprolactones, polyamides, polyacetals, polyethers, polyesters, poly(orthoesters), polycyanoacrylates, polyvinyl alcohols, polyurethanes, polyphosphazenes, polyacrylates, polymethacrylates, polycyanoacrylates, polyureas, polystyrenes, polyamines, polylysine, poly(ethylene imine), poly(serine ester), poly(L-lactide-co-L-lysine), poly(4-hydroxy-L-proline ester), acrylic polymers, amine-containing polymers or combinations thereof.

[0702] As a non-limiting example, the polynucleotides, modified nucleic acids, enhanced modified RNA or ribonucleic acids of the invention may be formulated with the polymeric compound of PEG grafted with PLL as described in U.S. Pat. No. 6,177,274 herein incorporated by reference in its entirety. The formulation may be used for transfecting cells in vitro or for in vivo delivery of the modified nucleic acids, enhanced modified RNA or ribonucleic acids. In another example, the polynucleotides, modified nucleic acids, enhanced modified RNA or ribonucleic acids may be suspended in a solution or medium with a cationic polymer, in a dry pharmaceutical composition or in a solution that is capable of being dried as described in U.S. Pub. Nos. 20090042829 and 20090042825 each of which are herein incorporated by reference in their entireties.

[0703] As another non-limiting example the polynucleotides, modified nucleic acids, enhanced modified RNA or ribonucleic acids of the invention may be formulated with a PLGA-PEG block copolymer (see US Pub. No. US20120004293 and U.S. Pat. No. 8,236,330, each of which are herein incorporated by reference in their entireties). As a non-limiting example, the polynucleotides, modified nucleic acids, enhanced modified RNA or ribonucleic acids of the invention may be formulated with a diblock copolymer of PEG and PLA or PEG and PLGA (see U.S. Pat. No. 8,246,968, herein incorporated by reference in its entirety).

[0704] A polyamine derivative may be used to deliver nucleic acids or to treat and/or prevent a disease or to be included in an implantable or injectable device (U.S. Pub. No. 20100260817 herein incorporated by reference in its entirety). As a non-limiting example, a pharmaceutical composition may include the modified nucleic acids, enhanced modified RNA or ribonucleic acids and the polyamine derivative described in U.S. Pub. No. 20100260817 (the contents of which are incorporated herein by reference in its entirety).

[0705] The polynucleotides, modified nucleic acids, enhanced modified RNA or ribonucleic acids of the invention may be formulated with at least one acrylic polymer. Acrylic polymers include but are not limited to, acrylic acid, methacrylic acid, acrylic acid and methacrylic acid copolymers, methyl methacrylate copolymers, ethoxyethyl methacrylates, cyanoethyl methacrylate, amino alkyl methacrylate copolymer, poly(acrylic acid), poly(methacrylic acid), polycyanoacrylates and combinations thereof.

[0706] In one embodiment, the polynucleotides, modified nucleic acids, enhanced modified RNA or ribonucleic acids of the present invention may be formulated with at least one polymer described in International Publication Nos. WO2011115862, WO2012082574 and WO2012068187, each of which are herein incorporated by reference in their entireties. In another embodiment, the polynucleotides, modified nucleic acids, enhanced modified RNA or ribonucleic acids of the present invention may be formulated with a polymer of formula Z as described in WO2011115862, herein incorporated by reference in its entirety. In yet another embodiment, the polynucleotides, modified nucleic acids, enhanced modified RNA or ribonucleic acids may be formulated with a polymer of formula Z, Z′ or Z″ as described in WO2012082574 or WO2012068187, each of which are herein incorporated by reference in their entireties. The polymers formulated with the modified RNA of the present invention may be synthesized by the methods described in WO2012082574 or WO2012068187, each of which are herein incorporated by reference in their entireties.

[0707] Formulations of polynucleotides, modified nucleic acids, enhanced modified RNA or ribonucleic acids of the invention may include at least one amine-containing polymer such as, but not limited to polylysine, polyethylene imine, poly(amidoamine) dendrimers or combinations thereof.

[0708] For example, the polynucleotides, modified nucleic acids, enhanced modified RNA or ribonucleic acids of the invention may be formulated in a pharmaceutical compound including a poly(alkylene imine), a biodegradable cationic lipopolymer, a biodegradable block copolymer, a biodegradable polymer, or a biodegradable random copolymer, a biodegradable polyester block copolymer, a biodegradable polyester polymer, a biodegradable polyester random copolymer, a linear biodegradable copolymer, PAGA, a biodegradable cross-linked cationic multi-block copolymer or combinations thereof. The biodegradable cationic lipopolymer may be made by methods known in the art and/or described in U.S. Pat. No. 6,696,038, U.S. App. Nos. 20030073619 and 20040142474 each of which is herein incorporated by reference in their entireties. The poly(alkylene imine) may be made using methods known in the art and/or as described in U.S. Pub. No. 20100004315, herein incorporated by reference in its entirety. The biodegradabale polymer, biodegradable block copolymer, the biodegradable random copolymer, biodegradable polyester block copolymer, biodegradable polyester polymer, or biodegradable polyester random copolymer may be made using methods known in the art and/or as described in U.S. Pat. Nos. 6,517,869 and 6,267,987, the contents of which are each incorporated herein by reference in its entirety. The linear biodegradable copolymer may be made using methods known in the art and/or as described in U.S. Pat. No. 6,652,886. The PAGA polymer may be made using methods known in the art and/or as described in U.S. Pat. No. 6,217,912 herein incorporated by reference in its entirety. The PAGA polymer may be copolymerized to form a copolymer or block copolymer with polymers such as but not limited to, poly-L-lysine, polyargine, polyornithine, histones, avidin, protamines, polylactides and poly(lactide-co-glycolides). The biodegradable cross-linked cationic multi-block copolymers may be made my methods known in the art and/or as described in U.S. Pat. No. 8,057,821 or U.S. Pub. No. 2012009145 each of which are herein incorporated by reference in their entireties. For example, the multi-block copolymers may be synthesized using linear polyethyleneimine (LPEI) blocks which have distinct patterns as compared to branched polyethyleneimines. Further, the composition or pharmaceutical composition may be made by the methods known in the art, described herein, or as described in U.S. Pub. No. 20100004315 or U.S. Pat. Nos. 6,267,987 and 6,217,912 each of which are herein incorporated by reference in their entireties.

[0709] The polynucleotides, modified nucleic acids, enhanced modified RNA or ribonucleic acids of the invention may be formulated with at least one degradable polyester which may contain polycationic side chains. Degradeable polyesters include, but are not limited to, poly(serine ester), poly(L-lactide-co-L-lysine), poly(4-hydroxy-L-proline ester), and combinations thereof. In another embodiment, the degradable polyesters may include a PEG conjugation to form a PEGylated polymer.

[0710] In one embodiment, the polymers described herein may be conjugated to a lipid-terminating PEG. As a non-limiting example, PLGA may be conjugated to a lipid-terminating PEG forming PLGA-DSPE-PEG. As another non-limiting example, PEG conjugates for use with the present invention are described in International Publication No. WO2008103276, herein incorporated by reference in its entirety.

[0711] In one embodiment, the polynucleotides, modified RNA described herein may be conjugated with another compound. Non-limiting examples of conjugates are described in U.S. Pat. Nos. 7,964,578 and 7,833,992, each of which are herein incorporated by reference in their entireties. In another embodiment, modified RNA of the present invention may be conjugated with conjugates of formula 1-122 as described in U.S. Pat. Nos. 7,964,578 and 7,833,992, each of which are herein incorporated by reference in their entireties.

[0712] As described in U.S. Pub. No. 20100004313, herein incorporated by reference in its entirety, a gene delivery composition may include a nucleotide sequence and a poloxamer. For example, the polynucleotide, modified nucleic acids, enhanced modified RNA or ribonucleic acids of the present invention may be used in a gene delivery composition with the poloxamer described in U.S. Pub. No. 20100004313.

[0713] In one embodiment, the polymer formulation of the present invention may be stabilized by contacting the polymer formulation, which may include a cationic carrier, with a cationic lipopolymer which may be covalently linked to cholesterol and polyethylene glycol groups. The polymer formulation may be contacted with a cationic lipopolymer using the methods described in U.S. Pub. No. 20090042829 herein incorporated by reference in its entirety. The cationic carrier may include, but is not limited to, polyethylenimine, poly(trimethylenimine), poly(tetramethylenimine), polypropylenimine, aminoglycoside-polyamine, dideoxy-diamino-b-cyclodextrin, spermine, spermidine, poly(2-dimethylamino)ethyl methacrylate, poly(lysine), poly(histidine), poly(arginine), cationized gelatin, dendrimers, chitosan, 1,2-Dioleoyl-3-Trimethylammonium-Propane (DOTAP), N-[1-(2,3-dioleoyloxy)propyl]-N,N,N-trimethylammonium chloride (DOTMA), 1-[2-(oleoyloxy)ethyl]-2-oleyl-3-(2-hydroxyethyl)imidazolinium chloride (DOTIM), 2,3-dioleyloxy-N-[2(sperminecarboxamido)ethyl]-N,N-dimethyl-1-propanaminium trifluoroacetate (DOSPA), 3B—[N—(N′,N′-Dimethylaminoethane)-carbamoyl]Cholesterol Hydrochloride (DC-Cholesterol HCl) diheptadecylamidoglycyl spermidine (DOGS), N,N-distearyl-N,N-dimethylammonium bromide (DDAB), N-(1,2-dimyristyloxyprop-3-yl)-N,N-dimethyl-N-hydroxyethyl ammonium bromide (DMRIE), N,N-dioleyl-N,N-dimethylammonium chloride DODAC) and combinations thereof.

[0714] The polynucleotides, modified nucleic acids, enhanced modified RNA or ribonucleic acids of the invention can also be formulated as a nanoparticle using a combination of polymers, lipids, and/or other biodegradable agents, such as, but not limited to, calcium phosphate. Components may be combined in a core-shell, hybrid, and/or layer-by-layer architecture, to allow for fine-tuning of the nanoparticle so to deliver the modified nucleic acids, enhanced modified RNA or ribonucleic acids may be enhanced (Wang et al., Nat Mater. 2006 5:791-796; Fuller et al., Biomaterials. 2008 29:1526-1532; DeKoker et al., Adv Drug Deliv Rev. 2011 63:748-761; Endres et al., Biomaterials. 2011 32:7721-7731; Su et al., Mol Pharm. 2011 Jun. 6; 8(3):774-87; herein incorporated by reference in its entirety).

[0715] Biodegradable calcium phosphate nanoparticles in combination with lipids and/or polymers have been shown to deliver polynucleotides, modified nucleic acids, enhanced modified RNA or ribonucleic acids in vivo. In one embodiment, a lipid coated calcium phosphate nanoparticle, which may also contain a targeting ligand such as anisamide, may be used to deliver the polynucleotides, modified nucleic acids, enhanced modified RNA or ribonucleic acids of the present invention. For example, to effectively deliver siRNA in a mouse metastatic lung model a lipid coated calcium phosphate nanoparticle was used (Li et al., J Contr Rel. 2010 142: 416-421; Li et al., J Contr Rel. 2012 158:108-114; Yang et al., Mol Ther. 2012 20:609-615). This delivery system combines both a targeted nanoparticle and a component to enhance the endosomal escape, calcium phosphate, in order to improve delivery of the siRNA.

[0716] In one embodiment, calcium phosphate with a PEG-polyanion block copolymer may be used to deliver polynucleotides, modified nucleic acids, enhanced modified RNA or ribonucleic acids (Kazikawa et al., J Contr Rel. 2004 97:345-356; Kazikawa et al., J Contr Rel. 2006 111:368-370).

[0717] In one embodiment, a PEG-charge-conversional polymer (Pitella et al., Biomaterials. 2011 32:3106-3114) may be used to form a nanoparticle to deliver the polynucleotides, modified nucleic acids, enhanced modified RNA or ribonucleic acids of the present invention. The PEG-charge-conversional polymer may improve upon the PEG-polyanion block copolymers by being cleaved into a polycation at acidic pH, thus enhancing endosomal escape.

[0718] The use of core-shell nanoparticles has additionally focused on a high-throughput approach to synthesize cationic cross-linked nanogel cores and various shells (Siegwart et al., Proc Natl Acad Sci USA. 2011 108:12996-13001). The complexation, delivery, and internalization of the polymeric nanoparticles can be precisely controlled by altering the chemical composition in both the core and shell components of the nanoparticle. For example, the core-shell nanoparticles may efficiently deliver siRNA to mouse hepatocytes after they covalently attach cholesterol to the nanoparticle.

[0719] In one embodiment, a hollow lipid core comprising a middle PLGA layer and an outer neutral lipid layer containing PEG may be used to delivery of the polynucleotide, modified nucleic acids, enhanced modified RNA or ribonucleic acids of the present invention. As a non-limiting example, in mice bearing a luciferase-expressing tumor, it was determined that the lipid-polymer-lipid hybrid nanoparticle significantly suppressed luciferase expression, as compared to a conventional lipoplex (Shi et al, Angew Chem Int Ed. 2011 50:7027-7031).

### Peptides and Proteins

[0720] The polynucleotides, modified nucleic acids, enhanced modified RNA or ribonucleic acids of the invention can be formulated with peptides and/or proteins in order to increase transfection of cells by the modified nucleic acids, enhanced modified RNA or ribonucleic acids. In one embodiment, peptides such as, but not limited to, cell penetrating peptides and proteins and peptides that enable intracellular delivery may be used to deliver pharmaceutical formulations. A non-limiting example of a cell penetrating peptide which may be used with the pharmaceutical formulations of the present invention includes a cell-penetrating peptide sequence attached to polycations that facilitates delivery to the intracellular space, e.g., HIV-derived TAT peptide, penetratins, transportans, or hCT derived cell-penetrating peptides (see, e.g., Caron et al., Mol. Ther. 3(3):310-8 (2001); Langel, Cell-Penetrating Peptides: Processes and Applications (CRC Press, Boca Raton Fla., 2002); El-Andaloussi et al., Curr. Pharm. Des. 11(28):3597-611 (2003); and Deshayes et al., Cell. Mol. Life Sci. 62(16):1839-49 (2005), all of which are incorporated herein by reference). The compositions can also be formulated to include a cell penetrating agent, e.g., liposomes, which enhance delivery of the compositions to the intracellular space. Modified nucleic acids, enhanced modified RNA or ribonucleic acids of the invention may be complexed to peptides and/or proteins such as, but not limited to, peptides and/or proteins from Aileron Therapeutics (Cambridge, Mass.) and Permeon Biologics (Cambridge, Mass.) in order to enable intracellular delivery (Cronican et al., ACS Chem. Biol. 2010 5:747-752; McNaughton et al., Proc. Natl. Acad. Sci. USA 2009 106:6111-6116; Sawyer, Chem Biol Drug Des. 2009 73:3-6; Verdine and Hilinski, Methods Enzymol. 2012; 503:3-33; all of which are herein incorporated by reference in its entirety).

[0721] In one embodiment, the cell-penetrating polypeptide may comprise a first domain and a second domain. The first domain may comprise a supercharged polypeptide. The second domain may comprise a protein-binding partner. As used herein, “protein-binding partner” includes, but are not limited to, antibodies and functional fragments thereof, scaffold proteins, or peptides. The cell-penetrating polypeptide may further comprise an intracellular binding partner for the protein-binding partner. The cell-penetrating polypeptide may be capable of being secreted from a cell where the modified nucleic acids, enhanced modified RNA or ribonucleic acids may be introduced.

[0722] Formulations of the including peptides or proteins may be used to increase cell transfection by the polynucleotides, modified nucleic acids, enhanced modified RNA or ribonucleic acids, alter the biodistribution of the polynucleotides, modified nucleic acids, enhanced modified RNA or ribonucleic acids (e.g., by targeting specific tissues or cell types), and/or increase the translation of encoded protein.

### Cells

[0723] The polynucleotides, modified nucleic acids, enhanced modified RNA or ribonucleic acids of the invention can be transfected ex vivo into cells, which are subsequently transplanted into a subject. As non-limiting examples, the pharmaceutical compositions may include red blood cells to deliver modified RNA to liver and myeloid cells, virosomes to deliver modified RNA in virus-like particles (VLPs), and electroporated cells such as, but not limited to, from MAXCYTE® (Gaithersburg, Md.) and from ERYTECH® (Lyon, France) to deliver modified RNA. Examples of use of red blood cells, viral particles and electroporated cells to deliver payloads other than polynucleotides, modified nucleic acids, enhanced modified RNA or ribonucleic acids have been documented (Godfrin et al., Expert Opin Biol Ther. 2012 12:127-133; Fang et al., Expert Opin Biol Ther. 2012 12:385-389; Hu et al., Proc Natl Acad Sci USA. 2011 108:10980-10985; Lund et al., Pharm Res. 2010 27:400-420; Huckriede et al., J Liposome Res. 2007; 17:39-47; Cusi, Hum Vaccin. 2006 2:1-7; de Jonge et al., Gene Ther. 2006 13:400-411; all of which are herein incorporated by reference in its entirety). The modified RNA may be delivered in synthetic VLPs synthesized by the methods described in International Pub No. WO2011085231 and US Pub No. 20110171248, each of which are herein incorporated by reference in their entireties.

[0724] Cell-based formulations of the polynucleotides, modified nucleic acids, enhanced modified RNA or ribonucleic acids of the invention may be used to ensure cell transfection (e.g., in the cellular carrier), alter the biodistribution of the modified nucleic acids, enhanced modified RNA or ribonucleic acids (e.g., by targeting the cell carrier to specific tissues or cell types), and/or increase the translation of encoded protein.

Introduction into Cells

[0725] A variety of methods are known in the art and suitable for introduction of nucleic acid into a cell, including viral and non-viral mediated techniques. Examples of typical non-viral mediated techniques include, but are not limited to, electroporation, calcium phosphate mediated transfer, nucleofection, sonoporation, heat shock, magnetofection, liposome mediated transfer, microinjection, microprojectile mediated transfer (nanoparticles), cationic polymer mediated transfer (DEAE-dextran, polyethylenimine, polyethylene glycol (PEG) and the like) or cell fusion.

[0726] The technique of sonoporaiton, or cellular sonication, is the use of sound (e.g., ultrasonic frequencies) for modifying the permeability of the cell plasma membrane. Sonoporation methods are known to those in the art and are taught for example as it relates to bacteria in US Patent Publication 20100196983 and as it relates to other cell types in, for example, US Patent Publication 20100009424, each of which are incorporated herein by reference in their entirety.

[0727] Electroporation techniques are also well known in the art. In one embodiment, modified nucleic acids, enhanced modified RNA or ribonucleic acids may be delivered by electroporation as described in Example 11.

### Hyaluronidase

[0728] The intramuscular or subcutaneous localized injection of polynucleotides, modified nucleic acids, enhanced modified RNA or ribonucleic acids of the invention can include hyaluronidase, which catalyzes the hydrolysis of hyaluronan. By catalyzing the hydrolysis of hyaluronan, a constituent of the interstitial barrier, hyaluronidase lowers the viscosity of hyaluronan, thereby increasing tissue permeability (Frost, Expert Opin. Drug Deliv. (2007) 4:427-440; herein incorporated by reference in its entirety). It is useful to speed their dispersion and systemic distribution of encoded proteins produced by transfected cells. Alternatively, the hyaluronidase can be used to increase the number of cells exposed to a modified nucleic acids, enhanced modified RNA or ribonucleic acids of the invention administered intramuscularly or subcutaneously.

### Nanoparticle Mimics

[0729] The polynucleotides, modified nucleic acids, enhanced modified RNA or ribonucleic acids of the invention may be encapsulated within and/or absorbed to a nanoparticle mimic. A nanoparticle mimic can mimic the delivery function organisms or particles such as, but not limited to, pathogens, viruses, bacteria, fungus, parasites, prions and cells. As a non-limiting example the polynucleotides, modified nucleic acids, enhanced modified RNA or ribonucleic acids of the invention may be encapsulated in a non-viron particle which can mimic the delivery function of a virus (see International Pub. No. WO2012006376 herein incorporated by reference in its entirety).

### Nanotubes

[0730] The polynucleotides, modified nucleic acids, enhanced modified RNA or ribonucleic acids of the invention can be attached or otherwise bound to at least one nanotube such as, but not limited to, rosette nanotubes, rosette nanotubes having twin bases with a linker, carbon nanotubes and/or single-walled carbon nanotubes, The polynucleotides, modified nucleic acids, enhanced modified RNA or ribonucleic acids may be bound to the nanotubes through forces such as, but not limited to, steric, ionic, covalent and/or other forces.

[0731] In one embodiment, the nanotube can release one or more polynucleotides, modified nucleic acids, enhanced modified RNA or ribonucleic acids into cells. The size and/or the surface structure of at least one nanotube may be altered so as to govern the interaction of the nanotubes within the body and/or to attach or bind to the polynucleotides, modified nucleic acids, enhanced modified RNA or ribonucleic acids disclosed herein. In one embodiment, the building block and/or the functional groups attached to the building block of the at least one nanotube may be altered to adjust the dimensions and/or properties of the nanotube. As a non-limiting example, the length of the nanotubes may be altered to hinder the nanotubes from passing through the holes in the walls of normal blood vessels but still small enough to pass through the larger holes in the blood vessels of tumor tissue.

[0732] In one embodiment, at least one nanotube may also be coated with delivery enhancing compounds including polymers, such as, but not limited to, polyethylene glycol. In another embodiment, at least one nanotube and/or the modified mRNA may be mixed with pharmaceutically acceptable excipients and/or delivery vehicles.

[0733] In one embodiment, the polynucleotides or modified mRNA are attached and/or otherwise bound to at least one rosette nanotube. The rosette nanotubes may be formed by a process known in the art and/or by the process described in International Publication No. WO2012094304, herein incorporated by reference in its entirety. At least one modified mRNA may be attached and/or otherwise bound to at least one rosette nanotube by a process as described in International Publication No. WO2012094304, herein incorporated by reference in its entirety, where rosette nanotubes or modules forming rosette nanotubes are mixed in aqueous media with at least one modified mRNA under conditions which may cause at least one modified mRNA to attach or otherwise bind to the rosette nanotubes.

### Conjugates

[0734] The polynucleotides, modified nucleic acids, enhanced modified RNA or ribonucleic acids of the invention include conjugates, such as a modified nucleic acids, enhanced modified RNA or ribonucleic acids covalently linked to a carrier or targeting group, or including two encoding regions that together produce a fusion protein (e.g., bearing a targeting group and therapeutic protein or peptide).

[0735] The conjugates of the invention include a naturally occurring substance, such as a protein (e.g., human serum albumin (HSA), low-density lipoprotein (LDL), high-density lipoprotein (HDL), or globulin); an carbohydrate (e.g., a dextran, pullulan, chitin, chitosan, inulin, cyclodextrin or hyaluronic acid); or a lipid. The ligand may also be a recombinant or synthetic molecule, such as a synthetic polymer, e.g., a synthetic polyamino acid, an oligonucleotide (e.g. an aptamer). Examples of polyamino acids include polyamino acid is a polylysine (PLL), poly L-aspartic acid, poly L-glutamic acid, styrene-maleic acid anhydride copolymer, poly(L-lactide-co-glycolied) copolymer, divinyl ether-maleic anhydride copolymer, N-(2-hydroxypropyl)methacrylamide copolymer (HMPA), polyethylene glycol (PEG), polyvinyl alcohol (PVA), polyurethane, poly(2-ethylacryllic acid), N-isopropylacrylamide polymers, or polyphosphazine. Example of polyamines include: polyethylenimine, polylysine (PLL), spermine, spermidine, polyamine, pseudopeptide-polyamine, peptidomimetic polyamine, dendrimer polyamine, arginine, amidine, protamine, cationic lipid, cationic porphyrin, quaternary salt of a polyamine, or an alpha helical peptide.

[0736] Representative U.S. patents that teach the preparation of polynucleotide conjugates, particularly to RNA, include, but are not limited to, U.S. Pat. Nos. 4,828,979; 4,948,882; 5,218,105; 5,525,465; 5,541,313; 5,545,730; 5,552,538; 5,578,717, 5,580,731; 5,591,584; 5,109,124; 5,118,802; 5,138,045; 5,414,077; 5,486,603; 5,512,439; 5,578,718; 5,608,046; 4,587,044; 4,605,735; 4,667,025; 4,762,779; 4,789,737; 4,824,941; 4,835,263; 4,876,335; 4,904,582; 4,958,013; 5,082,830; 5,112,963; 5,214,136; 5,082,830; 5,112,963; 5,214,136; 5,245,022; 5,254,469; 5,258,506; 5,262,536; 5,272,250; 5,292,873; 5,317,098; 5,371,241, 5,391,723; 5,416,203, 5,451,463; 5,510,475; 5,512,667; 5,514,785; 5,565,552; 5,567,810; 5,574,142; 5,585,481; 5,587,371; 5,595,726; 5,597,696; 5,599,923; 5,599,928 and 5,688,941; 6,294,664; 6,320,017; 6,576,752; 6,783,931; 6,900,297; 7,037,646; each of which is herein incorporated by reference in their entireties.

[0737] In one embodiment, the conjugate of the present invention may function as a carrier for the polynucleotide, modified nucleic acids, enhanced modified RNA or ribonucleic acids of the present invention. The conjugate may comprise a cationic polymer such as, but not limited to, polyamine, polylysine, polyalkylenimine, and polyethylenimine which may be grafted to with poly(ethylene glycol). As a non-limiting example, the conjugate may be similar to the polymeric conjugate and the method of synthesizing the polymeric conjugate described in U.S. Pat. No. 6,586,524 herein incorporated by reference in its entirety.

[0738] The conjugates can also include targeting groups, e.g., a cell or tissue targeting agent, e.g., a lectin, glycoprotein, lipid or protein, e.g., an antibody, that binds to a specified cell type such as a kidney cell. A targeting group can be a thyrotropin, melanotropin, lectin, glycoprotein, surfactant protein A, Mucin carbohydrate, multivalent lactose, multivalent galactose, N-acetyl-galactosamine, N-acetyl-gulucosamine multivalent mannose, multivalent fucose, glycosylated polyaminoacids, multivalent galactose, transferrin, bisphosphonate, polyglutamate, polyaspartate, a lipid, cholesterol, a steroid, bile acid, folate, vitamin B12, biotin, an RGD peptide, an RGD peptide mimetic or an aptamer.

[0739] Targeting groups can be proteins, e.g., glycoproteins, or peptides, e.g., molecules having a specific affinity for a co-ligand, or antibodies e.g., an antibody, that binds to a specified cell type such as a cancer cell, endothelial cell, or bone cell. Targeting groups may also include hormones and hormone receptors. They can also include non-peptidic species, such as lipids, lectins, carbohydrates, vitamins, cofactors, multivalent lactose, multivalent galactose, N-acetyl-galactosamine, N-acetyl-gulucosamine multivalent mannose, multivalent fucose, or aptamers. The ligand can be, for example, a lipopolysaccharide, or an activator of p38 MAP kinase.

[0740] The targeting group can be any ligand that is capable of targeting a specific receptor. Examples include, without limitation, folate, GalNAc, galactose, mannose, mannose-6P, apatamers, integrin receptor ligands, chemokine receptor ligands, transferrin, biotin, serotonin receptor ligands, PSMA, endothelin, GCPII, somatostatin, LDL, and HDL ligands. In particular embodiments, the targeting group is an aptamer. The aptamer can be unmodified or have any combination of modifications disclosed herein.

[0741] In one embodiment, pharmaceutical compositions of the present invention may include chemical modifications such as, but not limited to, modifications similar to locked nucleic acids.

[0742] Representative U.S. patents that teach the preparation of locked nucleic acid (LNA) such as those from Santaris, include, but are not limited to, the following: U.S. Pat. Nos. 6,268,490; 6,670,461; 6,794,499; 6,998,484; 7,053,207; 7,084,125; and 7,399,845, each of which is herein incorporated by reference in its entirety.

[0743] Representative U.S. patents that teach the preparation of PNA compounds include, but are not limited to, U.S. Pat. Nos. 5,539,082; 5,714,331; and 5,719,262, each of which is herein incorporated by reference. Further teaching of PNA compounds can be found, for example, in Nielsen et al., Science, 1991, 254, 1497-1500.

[0744] Some embodiments featured in the invention include modified nucleic acids, enhanced modified RNA or ribonucleic acids with phosphorothioate backbones and oligonucleosides with other modified backbones, and in particular —CH₂—NH—CH₂—, —CH₂—N(CH₃)—O—CH₂— [known as a methylene (methylimino) or MMI backbone], —CH₂—O—N(CH₃)—CH₂—, —CH₂—N(CH₃)—N(CH₃)—CH₂— and —N(CH₃)—CH₂—CH₂— [wherein the native phosphodiester backbone is represented as —O—P(O)₂—O—CH₂—] of the above-referenced U.S. Pat. No. 5,489,677, and the amide backbones of the above-referenced U.S. Pat. No. 5,602,240. In some embodiments, the polynucletotides featured herein have morpholino backbone structures of the above-referenced U.S. Pat. No. 5,034,506.

[0745] Modifications at the 2′ position may also aid in delivery. Preferably, modifications at the 2′ position are not located in a polypeptide-coding sequence, i.e., not in a translatable region. Modifications at the 2′ position may be located in a 5′UTR, a 3′UTR and/or a tailing region. Modifications at the 2′ position can include one of the following at the 2′ position: H (i.e., 2′-deoxy); F; O-, S-, or N-alkyl; O-, S-, or N-alkenyl; O-, S- or N-alkynyl; or O-alkyl-O-alkyl, wherein the alkyl, alkenyl and alkynyl may be substituted or unsubstituted C₁ to C₁₀ alkyl or C₂ to C₁₀ alkenyl and alkynyl. Exemplary suitable modifications include O[(CH₂)ₙO]ₘCH₃, O(CH₂)ₙOCH₃, O(CH₂)—NH₂, O(CH₂) ₙCH₃, O(CH₂)ₙONH₂, and O(CH₂)ₙON[(CH₂)ₙCH₃)]₂, where n and m are from 1 to about 10. In other embodiments, the modified nucleic acids, enhanced modified RNA or ribonucleic acids include one of the following at the 2′ position: C₁ to C₁₀ lower alkyl, substituted lower alkyl, alkaryl, aralkyl, O-alkaryl or O-aralkyl, SH, SCH₃, OCN, Cl, Br, CN, CF₃, OCF₃, SOCH₃, SO₂CH₃, ONO₂, NO₂, N₃, NH₂, heterocycloalkyl, heterocycloalkaryl, aminoalkylamino, polyalkylamino, substituted silyl, an RNA cleaving group, a reporter group, an intercalator, a group for improving the pharmacokinetic properties, or a group for improving the pharmacodynamic properties, and other substituents having similar properties. In some embodiments, the modification includes a 2′-methoxyethoxy (2′-O—CH₂CH₂OCH₃, also known as 2′-O-(2-methoxyethyl) or 2′-MOE) (Martin et al., Helv. Chim. Acta, 1995, 78:486-504) i.e., an alkoxy-alkoxy group. Another exemplary modification is 2′-dimethylaminooxyethoxy, i.e., a O(CH₂)₂ON(CH₃)₂ group, also known as 2′-DMAOE, as described in examples herein below, and 2′-dimethylaminoethoxyethoxy (also known in the art as 2′-O-dimethylaminoethoxyethyl or 2′-DMAEOE), i.e., 2′-O—CH₂—O—CH₂—N(CH₂)₂, also described in examples herein below. Other modifications include 2′-methoxy (2′-OCH₃), 2′-aminopropoxy (2′-OCH₂CH₂CH₂NH₂) and 2′-fluoro (2′-F). Similar modifications may also be made at other positions, particularly the 3′ position of the sugar on the 3′ terminal nucleotide or in 2′-5′ linked dsRNAs and the 5′ position of 5′ terminal nucleotide. Polynucleotides of the invention may also have sugar mimetics such as cyclobutyl moieties in place of the pentofuranosyl sugar. Representative U.S. patents that teach the preparation of such modified sugar structures include, but are not limited to, U.S. Pat. Nos. 4,981,957; 5,118,800; 5,319,080; 5,359,044; 5,393,878; 5,446,137; 5,466,786; 5,514,785; 5,519,134; 5,567,811; 5,576,427; 5,591,722; 5,597,909; 5,610,300; 5,627,053; 5,639,873; 5,646,265; 5,658,873; 5,670,633; and 5,700,920 and each of which is herein incorporated by reference.

[0746] In still other embodiments, the polynucleotides, modified nucleic acids, enhanced modified RNA or ribonucleic acids is covalently conjugated to a cell penetrating polypeptide. The cell-penetrating peptide may also include a signal sequence. The conjugates of the invention can be designed to have increased stability; increased cell transfection; and/or altered the biodistribution (e.g., targeted to specific tissues or cell types).

### Self-Assembled Nucleic Acid Nanoparticles

[0747] Self-assembled nanoparticles have a well-defined size which may be precisely controlled as the nucleic acid strands may be easily reprogrammable. For example, the optimal particle size for a cancer-targeting nanodelivery carrier is 20-100 nm as a diameter greater than 20 nm avoids renal clearance and enhances delivery to certain tumors through enhanced permeability and retention effect. Using self-assembled nucleic acid nanoparticles a single uniform population in size and shape having a precisely controlled spatial orientation and density of cancer-targeting ligands for enhanced delivery. As a non-limiting example, oligonucleotide nanoparticles were prepared using programmable self-assembly of short DNA fragments and therapeutic siRNAs. These nanoparticles are molecularly identical with controllable particle size and target ligand location and density. The DNA fragments and siRNAs self-assembled into a one-step reaction to generate DNA/siRNA tetrahedral nanoparticles for targeted in vivo delivery. (Lee et al., Nature Nanotechnology 2012 7:389-393).

### Excipients

[0748] Pharmaceutical formulations may additionally comprise a pharmaceutically acceptable excipient, which, as used herein, includes, but are not limited to, any and all solvents, dispersion media, diluents, or other liquid vehicles, dispersion or suspension aids, surface active agents, isotonic agents, thickening or emulsifying agents, preservatives, solid binders, lubricants and the like, as suited to the particular dosage form desired. Various excipients for formulating pharmaceutical compositions and techniques for preparing the composition are known in the art (see Remington: The Science and Practice of Pharmacy, 21^{st} Edition, A. R. Gennaro, Lippincott, Williams & Wilkins, Baltimore, Md., 2006; incorporated herein by reference). The use of a conventional excipient medium may be contemplated within the scope of the present disclosure, except insofar as any conventional excipient medium may be incompatible with a substance or its derivatives, such as by producing any undesirable biological effect or otherwise interacting in a deleterious manner with any other component(s) of the pharmaceutical composition.

[0749] In some embodiments, a pharmaceutically acceptable excipient may be at least 95%, at least 96%, at least 97%, at least 98%, at least 99%, or 100% pure. In some embodiments, an excipient may be approved for use for humans and for veterinary use. In some embodiments, an excipient may be approved by United States Food and Drug Administration. In some embodiments, an excipient may be of pharmaceutical grade. In some embodiments, an excipient may meet the standards of the United States Pharmacopoeia (USP), the European Pharmacopoeia (EP), the British Pharmacopoeia, and/or the International Pharmacopoeia.

[0750] Pharmaceutically acceptable excipients used in the manufacture of pharmaceutical compositions include, but are not limited to, inert diluents, dispersing and/or granulating agents, surface active agents and/or emulsifiers, disintegrating agents, binding agents, preservatives, buffering agents, lubricating agents, and/or oils. Such excipients may optionally be included in pharmaceutical formulations. The composition may also include excipients such as cocoa butter and suppository waxes, coloring agents, coating agents, sweetening, flavoring, and/or perfuming agents.

[0751] Exemplary diluents include, but are not limited to, calcium carbonate, sodium carbonate, calcium phosphate, dicalcium phosphate, calcium sulfate, calcium hydrogen phosphate, sodium phosphate lactose, sucrose, cellulose, microcrystalline cellulose, kaolin, mannitol, sorbitol, inositol, sodium chloride, dry starch, cornstarch, powdered sugar, etc., and/or combinations thereof.

[0752] Exemplary granulating and/or dispersing agents include, but are not limited to, potato starch, corn starch, tapioca starch, sodium starch glycolate, clays, alginic acid, guar gum, citrus pulp, agar, bentonite, cellulose and wood products, natural sponge, cation-exchange resins, calcium carbonate, silicates, sodium carbonate, cross-linked poly(vinyl-pyrrolidone) (crospovidone), sodium carboxymethyl starch (sodium starch glycolate), carboxymethyl cellulose, cross-linked sodium carboxymethyl cellulose (croscarmellose), methylcellulose, pregelatinized starch (starch 1500), microcrystalline starch, water insoluble starch, calcium carboxymethyl cellulose, magnesium aluminum silicate (Veegum), sodium lauryl sulfate, quaternary ammonium compounds, etc., and/or combinations thereof.

[0753] Exemplary surface active agents and/or emulsifiers include, but are not limited to, natural emulsifiers (e.g. acacia, agar, alginic acid, sodium alginate, tragacanth, chondrux, cholesterol, xanthan, pectin, gelatin, egg yolk, casein, wool fat, cholesterol, wax, and lecithin), colloidal clays (e.g. bentonite [aluminum silicate] and VEEGUM® [magnesium aluminum silicate]), long chain amino acid derivatives, high molecular weight alcohols (e.g. stearyl alcohol, cetyl alcohol, oleyl alcohol, triacetin monostearate, ethylene glycol distearate, glyceryl monostearate, and propylene glycol monostearate, polyvinyl alcohol), carbomers (e.g. carboxy polymethylene, polyacrylic acid, acrylic acid polymer, and carboxyvinyl polymer), carrageenan, cellulosic derivatives (e.g. carboxymethylcellulose sodium, powdered cellulose, hydroxymethyl cellulose, hydroxypropyl cellulose, hydroxypropyl methylcellulose, methylcellulose), sorbitan fatty acid esters (e.g. polyoxyethylene sorbitan monolaurate [TWEEN®20], polyoxyethylene sorbitan [TWEEN®60], polyoxyethylene sorbitan monooleate [TWEEN®80], sorbitan monopalmitate [SPAN®40], sorbitan monostearate [Span®60], sorbitan tristearate [Span®65], glyceryl monooleate, sorbitan monooleate [SPAN®80]), polyoxyethylene esters (e.g. polyoxyethylene monostearate [MYRJ®45], polyoxyethylene hydrogenated castor oil, polyethoxylated castor oil, polyoxymethylene stearate, and SOLUTOL®), sucrose fatty acid esters, polyethylene glycol fatty acid esters (e.g. CREMOPHOR®), polyoxyethylene ethers, (e.g. polyoxyethylene lauryl ether [BRIJ®30]), poly(vinyl-pyrrolidone), diethylene glycol monolaurate, triethanolamine oleate, sodium oleate, potassium oleate, ethyl oleate, oleic acid, ethyl laurate, sodium lauryl sulfate, PLUORINC®F 68, POLOXAMER®188, cetrimonium bromide, cetylpyridinium chloride, benzalkonium chloride, docusate sodium, etc. and/or combinations thereof.

[0754] Exemplary binding agents include, but are not limited to, starch (e.g. cornstarch and starch paste); gelatin; sugars (e.g. sucrose, glucose, dextrose, dextrin, molasses, lactose, lactitol, mannitol); natural and synthetic gums (e.g. acacia, sodium alginate, extract of Irish moss, panwar gum, ghatti gum, mucilage of isapol husks, carboxymethylcellulose, methylcellulose, ethylcellulose, hydroxyethylcellulose, hydroxypropyl cellulose, hydroxypropyl methylcellulose, microcrystalline cellulose, cellulose acetate, poly(vinyl-pyrrolidone), magnesium aluminum silicate (VEEGUM®), and larch arabogalactan); alginates; polyethylene oxide; polyethylene glycol; inorganic calcium salts; silicic acid; polymethacrylates; waxes; water; alcohol; etc.; and combinations thereof.

[0755] Exemplary preservatives may include, but are not limited to, antioxidants, chelating agents, antimicrobial preservatives, antifungal preservatives, alcohol preservatives, acidic preservatives, and/or other preservatives. Exemplary antioxidants include, but are not limited to, alpha tocopherol, ascorbic acid, acorbyl palmitate, butylated hydroxyanisole, butylated hydroxytoluene, monothioglycerol, potassium metabisulfite, propionic acid, propyl gallate, sodium ascorbate, sodium bisulfite, sodium metabisulfite, and/or sodium sulfite. Exemplary chelating agents include ethylenediaminetetraacetic acid (EDTA), citric acid monohydrate, disodium edetate, dipotassium edetate, edetic acid, fumaric acid, malic acid, phosphoric acid, sodium edetate, tartaric acid, and/or trisodium edetate. Exemplary antimicrobial preservatives include, but are not limited to, benzalkonium chloride, benzethonium chloride, benzyl alcohol, bronopol, cetrimide, cetylpyridinium chloride, chlorhexidine, chlorobutanol, chlorocresol, chloroxylenol, cresol, ethyl alcohol, glycerin, hexetidine, imidurea, phenol, phenoxyethanol, phenylethyl alcohol, phenylmercuric nitrate, propylene glycol, and/or thimerosal. Exemplary antifungal preservatives include, but are not limited to, butyl paraben, methyl paraben, ethyl paraben, propyl paraben, benzoic acid, hydroxybenzoic acid, potassium benzoate, potassium sorbate, sodium benzoate, sodium propionate, and/or sorbic acid. Exemplary alcohol preservatives include, but are not limited to, ethanol, polyethylene glycol, phenol, phenolic compounds, bisphenol, chlorobutanol, hydroxybenzoate, and/or phenylethyl alcohol. Exemplary acidic preservatives include, but are not limited to, vitamin A, vitamin C, vitamin E, beta-carotene, citric acid, acetic acid, dehydroacetic acid, ascorbic acid, sorbic acid, and/or phytic acid. Other preservatives include, but are not limited to, tocopherol, tocopherol acetate, deteroxime mesylate, cetrimide, butylated hydroxyanisol (BHA), butylated hydroxytoluened (BHT), ethylenediamine, sodium lauryl sulfate (SLS), sodium lauryl ether sulfate (SLES), sodium bisulfite, sodium metabisulfite, potassium sulfite, potassium metabisulfite, GLYDANT PLUS®, PHENONIP®, methylparaben, GERMALL®115, GERMABEN®II, NEOLONE™, KATHON™, and/or EUXYL®.

[0756] Exemplary buffering agents include, but are not limited to, citrate buffer solutions, acetate buffer solutions, phosphate buffer solutions, ammonium chloride, calcium carbonate, calcium chloride, calcium citrate, calcium glubionate, calcium gluceptate, calcium gluconate, d-gluconic acid, calcium glycerophosphate, calcium lactate, propanoic acid, calcium levulinate, pentanoic acid, dibasic calcium phosphate, phosphoric acid, tribasic calcium phosphate, calcium hydroxide phosphate, potassium acetate, potassium chloride, potassium gluconate, potassium mixtures, dibasic potassium phosphate, monobasic potassium phosphate, potassium phosphate mixtures, sodium acetate, sodium bicarbonate, sodium chloride, sodium citrate, sodium lactate, dibasic sodium phosphate, monobasic sodium phosphate, sodium phosphate mixtures, tromethamine, magnesium hydroxide, aluminum hydroxide, alginic acid, pyrogen-free water, isotonic saline, Ringer's solution, ethyl alcohol, etc., and/or combinations thereof.

[0757] Exemplary lubricating agents include, but are not limited to, magnesium stearate, calcium stearate, stearic acid, silica, talc, malt, glyceryl behanate, hydrogenated vegetable oils, polyethylene glycol, sodium benzoate, sodium acetate, sodium chloride, leucine, magnesium lauryl sulfate, sodium lauryl sulfate, etc., and combinations thereof.

[0758] Exemplary oils include, but are not limited to, almond, apricot kernel, avocado, babassu, bergamot, black current seed, borage, cade, camomile, canola, caraway, carnauba, castor, cinnamon, cocoa butter, coconut, cod liver, coffee, corn, cotton seed, emu, eucalyptus, evening primrose, fish, flaxseed, geraniol, gourd, grape seed, hazel nut, hyssop, isopropyl myristate, jojoba, kukui nut, lavandin, lavender, lemon, litsea cubeba, macademia nut, mallow, mango seed, meadowfoam seed, mink, nutmeg, olive, orange, orange roughy, palm, palm kernel, peach kernel, peanut, poppy seed, pumpkin seed, rapeseed, rice bran, rosemary, safflower, sandalwood, sasquana, savoury, sea buckthorn, sesame, shea butter, silicone, soybean, sunflower, tea tree, thistle, tsubaki, vetiver, walnut, and wheat germ oils. Exemplary oils include, but are not limited to, butyl stearate, caprylic triglyceride, capric triglyceride, cyclomethicone, diethyl sebacate, dimethicone 360, isopropyl myristate, mineral oil, octyldodecanol, oleyl alcohol, silicone oil, and/or combinations thereof.

[0759] Excipients such as cocoa butter and suppository waxes, coloring agents, coating agents, sweetening, flavoring, and/or perfuming agents can be present in the composition, according to the judgment of the formulator.

### Delivery

[0760] The present disclosure encompasses the delivery of polynucleotides, modified nucleic acids, enhanced modified RNA or ribonucleic acids for any of therapeutic, pharmaceutical, diagnostic or imaging by any appropriate route taking into consideration likely advances in the sciences of drug delivery. Delivery may be naked or formulated.

### Naked Delivery

[0761] The polynucleotides, modified nucleic acids, enhanced modified RNA or ribonucleic acids of the present invention may be delivered to a cell naked. As used herein in, “naked” refers to delivering polynucleotides, modified nucleic acids, enhanced modified RNA or ribonucleic acids free from agents which promote transfection. For example, the polynucleotides, modified nucleic acids, enhanced modified RNA or ribonucleic acids delivered to the cell may contain no modifications. The naked polynucleotides, modified nucleic acids, enhanced modified RNA or ribonucleic acids may be delivered to the cell using routes of administration known in the art and described herein.

### Formulated Delivery

[0762] The polynucleotides, modified nucleic acids, enhanced modified RNA or ribonucleic acids of the present invention may be formulated, using the methods described herein. The formulations may contain polynucleotides, modified nucleic acids, enhanced modified RNA or ribonucleic acids which may be modified and/or unmodified. The formulations may further include, but are not limited to, cell penetration agents, a pharmaceutically acceptable carrier, a delivery agent, a bioerodible or biocompatible polymer, a solvent, and a sustained-release delivery depot. The formulated polynucleotides, modified nucleic acids or enhanced modified nucleic acids may be delivered to the cell using routes of administration known in the art and described herein.

[0763] The compositions may also be formulated for direct delivery to an organ or tissue in any of several ways in the art including, but not limited to, direct soaking or bathing, via a catheter, by gels, powder, ointments, creams, gels, lotions, and/or drops, by using substrates such as fabric or biodegradable materials coated or impregnated with the compositions, and the like.

[0764] In certain embodiments, the formulations include one or more cell penetration agents, e.g., transfection agents. In one specific embodiment, a ribonucleic acid is mixed or admixed with a transfection agent (or mixture thereof) and the resulting mixture is employed to transfect cells. Preferred transfection agents are cationic lipid compositions, particularly monovalent and polyvalent cationic lipid compositions, more particularly “LIPOFECTIN,” “LIPOFECTACE,” “LIPOFECTAMINE,” “CELLFECTIN,” DMRIE-C, DMRIE, DOTAP, DOSPA, and DOSPER, and dendrimer compositions, particularly G5-G10 dendrimers, including dense star dendrimers, PAMAM dendrimers, grafted dendrimers, and dendrimers known as dendrigrafts and “SUPERFECT.” In a second specific transfection method, a ribonucleic acid is conjugated to a nucleic acid-binding group, for example a polyamine and more particularly a spermine, which is then introduced into the cell or admixed with a transfection agent (or mixture thereof) and the resulting mixture is employed to transfect cells. In a third specific embodiment, a mixture of one or more transfection-enhancing peptides, proteins, or protein fragments, including fusagenic peptides or proteins, transport or trafficking peptides or proteins, receptor-ligand peptides or proteins, or nuclear localization peptides or proteins and/or their modified analogs (e.g., spermine modified peptides or proteins) or combinations thereof are mixed with and complexed with a ribonucleic acid to be introduced into a cell, optionally being admixed with transfection agent and the resulting mixture is employed to transfect cells. Further, a component of a transfection agent (e.g., lipids, cationic lipids or dendrimers) is covalently conjugated to selected peptides, proteins, or protein fragments directly or via a linking or spacer group. Of particular interest in this embodiment are peptides or proteins that are fusagenic, membrane-permeabilizing, transport or trafficking, or which function for cell-targeting. The peptide- or protein-transfection agent complex is combined with a ribonucleic acid and employed for transfection.

[0765] In certain embodiments, the formulations include a pharmaceutically acceptable carrier that causes the effective amount of polynucleotide, modified nucleic acid, or ribonucleic acid to be substantially retained in a target tissue containing the cell.

### Administration

[0766] The polynucleotides, modified nucleic acids, enhanced modified RNA or ribonucleic acids of the present invention may be administered by any route which results in a therapeutically effective outcome. These include, but are not limited to enteral, gastroenteral, epidural, oral, transdermal, epidural (peridural), intracerebral (into the cerebrum), intracerebroventricular (into the cerebral ventricles), epicutaneous (application onto the skin), intradermal, (into the skin itself), subcutaneous (under the skin), nasal administration (through the nose), intravenous (into a vein), intraarterial (into an artery), intramuscular (into a muscle), intracardiac (into the heart), intraosseous infusion (into the bone marrow), intrathecal (into the spinal canal), intraperitoneal, (infusion or injection into the peritoneum), intravesical infusion, intravitreal, (through the eye), intracavernous injection, (into the base of the penis), intravaginal administration, intrauterine, extra-amniotic administration, transdermal (diffusion through the intact skin for systemic distribution), transmucosal (diffusion through a mucous membrane), insufflation (snorting), sublingual, sublabial, enema, eye drops (onto the conjunctiva), or in ear drops.

[0767] In one embodiment, provided are compositions for generation of an in vivo depot containing a polynucleotide, modified nucleic acid or engineered ribonucleotide. For example, the composition contains a bioerodible, biocompatible polymer, a solvent present in an amount effective to plasticize the polymer and form a gel therewith, and a polynucleotide, modified nucleic acid or engineered ribonucleic acid. In certain embodiments the composition also includes a cell penetration agent as described herein. In other embodiments, the composition also contains a thixotropic amount of a thixotropic agent mixable with the polymer so as to be effective to form a thixotropic composition. Further compositions include a stabilizing agent, a bulking agent, a chelating agent, or a buffering agent.

[0768] In other embodiments, provided are sustained-release delivery depots, such as for administration of a polynucleotide, modified nucleic acid, or engineered ribonucleic acid an environment (meaning an organ or tissue site) in a patient. Such depots generally contain an engineered ribonucleic acid and a flexible chain polymer where both the engineered ribonucleic acid and the flexible chain polymer are entrapped within a porous matrix of a crosslinked matrix protein. Usually, the pore size is less than 1 mm, such as 900 nm, 800 nm, 700 nm, 600 nm, 500 nm, 400 nm, 300 nm, 200 nm, 100 nm, or less than 100 nm. Usually the flexible chain polymer is hydrophilic. Usually the flexible chain polymer has a molecular weight of at least 50 kDa, such as 75 kDa, 100 kDa, 150 kDa, 200 kDa, 250 kDa, 300 kDa, 400 kDa, 500 kDa, or greater than 500 kDa. Usually the flexible chain polymer has a persistence length of less than 10%, such as 9, 8, 7, 6, 5, 4, 3, 2, 1 or less than 1% of the persistence length of the matrix protein. Usually the flexible chain polymer has a charge similar to that of the matrix protein. In some embodiments, the flexible chain polymer alters the effective pore size of a matrix of crosslinked matrix protein to a size capable of sustaining the diffusion of the engineered ribonucleic acid from the matrix into a surrounding tissue comprising a cell into which the polynucleotide, modified nucleic acid, engineered ribonucleic acid is capable of entering.

[0769] In specific embodiments, compositions may be administered in a way which allows them cross the blood-brain barrier, vascular barrier, or other epithelial barrier. Non-limiting routes of administration for the polynucleotides, modified nucleic acids, enhanced modified RNA or ribonucleic acids of the present invention are described below.

[0770] The present invention provides methods comprising administering polynucleotides, modified mRNAs and their encoded proteins or complexes in accordance with the invention to a subject in need thereof. Nucleic acids, proteins or complexes, or pharmaceutical, imaging, diagnostic, or prophylactic compositions thereof, may be administered to a subject using any amount and any route of administration effective for preventing, treating, diagnosing, or imaging a disease, disorder, and/or condition (e.g., a disease, disorder, and/or condition relating to working memory deficits). The exact amount required will vary from subject to subject, depending on the species, age, and general condition of the subject, the severity of the disease, the particular composition, its mode of administration, its mode of activity, and the like. Compositions in accordance with the invention are typically formulated in dosage unit form for ease of administration and uniformity of dosage. It will be understood, however, that the total daily usage of the compositions of the present invention will be decided by the attending physician within the scope of sound medical judgment. The specific therapeutically effective, prophylactially effective, or appropriate imaging dose level for any particular patient will depend upon a variety of factors including the disorder being treated and the severity of the disorder; the activity of the specific compound employed; the specific composition employed; the age, body weight, general health, sex and diet of the patient; the time of administration, route of administration, and rate of excretion of the specific compound employed; the duration of the treatment; drugs used in combination or coincidental with the specific compound employed; and like factors well known in the medical arts.

### Parenteral and Injectible Administration

[0771] Liquid dosage forms for oral and parenteral administration include, but are not limited to, pharmaceutically acceptable emulsions, microemulsions, solutions, suspensions, syrups, and/or elixirs. In addition to active ingredients, liquid dosage forms may comprise inert diluents commonly used in the art such as, for example, water or other solvents, solubilizing agents and emulsifiers such as ethyl alcohol, isopropyl alcohol, ethyl carbonate, ethyl acetate, benzyl alcohol, benzyl benzoate, propylene glycol, 1,3-butylene glycol, dimethylformamide, oils (in particular, cottonseed, groundnut, corn, germ, olive, castor, and sesame oils), glycerol, tetrahydrofurfuryl alcohol, polyethylene glycols and fatty acid esters of sorbitan, and mixtures thereof. Besides inert diluents, oral compositions can include adjuvants such as wetting agents, emulsifying and suspending agents, sweetening, flavoring, and/or perfuming agents. In certain embodiments for parenteral administration, compositions are mixed with solubilizing agents such as CREMOPHOR®, alcohols, oils, modified oils, glycols, polysorbates, cyclodextrins, polymers, and/or combinations thereof.

[0772] Injectable preparations, for example, sterile injectable aqueous or oleaginous suspensions may be formulated according to the known art using suitable dispersing agents, wetting agents, and/or suspending agents. Sterile injectable preparations may be sterile injectable solutions, suspensions, and/or emulsions in nontoxic parenterally acceptable diluents and/or solvents, for example, as a solution in 1,3-butanediol. Among the acceptable vehicles and solvents that may be employed are water, Ringer's solution, U.S.P., and isotonic sodium chloride solution. Sterile, fixed oils are conventionally employed as a solvent or suspending medium. For this purpose any bland fixed oil can be employed including synthetic mono- or diglycerides. Fatty acids such as oleic acid can be used in the preparation of injectables.

[0773] Injectable formulations can be sterilized, for example, by filtration through a bacterial-retaining filter, and/or by incorporating sterilizing agents in the form of sterile solid compositions which can be dissolved or dispersed in sterile water or other sterile injectable medium prior to use.

[0774] In order to prolong the effect of an active ingredient, it is often desirable to slow the absorption of the active ingredient from subcutaneous or intramuscular injection. This may be accomplished by the use of a liquid suspension of crystalline or amorphous material with poor water solubility. The rate of absorption of the drug then depends upon its rate of dissolution which, in turn, may depend upon crystal size and crystalline form. Alternatively, delayed absorption of a parenterally administered drug form is accomplished by dissolving or suspending the drug in an oil vehicle. Injectable depot forms are made by forming microencapsule matrices of the drug in biodegradable polymers such as polylactide-polyglycolide. Depending upon the ratio of drug to polymer and the nature of the particular polymer employed, the rate of drug release can be controlled. Examples of other biodegradable polymers include poly(orthoesters) and poly(anhydrides). Depot injectable formulations are prepared by entrapping the drug in liposomes or microemulsions which are compatible with body tissues.

### Rectal and Vaginal Administration

[0775] Compositions for rectal or vaginal administration are typically suppositories which can be prepared by mixing compositions with suitable non-irritating excipients such as cocoa butter, polyethylene glycol or a suppository wax which are solid at ambient temperature but liquid at body temperature and therefore melt in the rectum or vaginal cavity and release the active ingredient.

### Oral Administration

[0776] Solid dosage forms for oral administration include capsules, tablets, pills, powders, and granules. In such solid dosage forms, an active ingredient is mixed with at least one inert, pharmaceutically acceptable excipient such as sodium citrate or dicalcium phosphate and/or fillers or extenders (e.g. starches, lactose, sucrose, glucose, mannitol, and silicic acid), binders (e.g. carboxymethylcellulose, alginates, gelatin, polyvinylpyrrolidinone, sucrose, and acacia), humectants (e.g. glycerol), disintegrating agents (e.g. agar, calcium carbonate, potato or tapioca starch, alginic acid, certain silicates, and sodium carbonate), solution retarding agents (e.g. paraffin), absorption accelerators (e.g. quaternary ammonium compounds), wetting agents (e.g. cetyl alcohol and glycerol monostearate), absorbents (e.g. kaolin and bentonite clay), and lubricants (e.g. talc, calcium stearate, magnesium stearate, solid polyethylene glycols, sodium lauryl sulfate), and mixtures thereof. In the case of capsules, tablets and pills, the dosage form may comprise buffering agents.

### Topical or Transdermal Administration

[0777] As described herein, compositions containing the polynucleotides, modified nucleic acids, enhanced modified RNA or ribonucleic acids of the invention may be formulated for administration topically. The skin may be an ideal target site for delivery as it is readily accessible. Gene expression may be restricted not only to the skin, potentially avoiding nonspecific toxicity, but also to specific layers and cell types within the skin.

[0778] The site of cutaneous expression of the delivered compositions will depend on the route of nucleic acid delivery. Three routes are commonly considered to deliver polynucleotides, modified nucleic acids, enhanced modified RNA or ribonucleic acids to the skin: (i) topical application (e.g. for local/regional treatment); (ii) intradermal injection (e.g. for local/regional treatment); and (iii) systemic delivery (e.g. for treatment of dermatologic diseases that affect both cutaneous and extracutaneous regions). Polynucleotides, modified nucleic acids, enhanced modified RNA or ribonucleic acids can be delivered to the skin by several different approaches known in the art. Most topical delivery approaches have been shown to work for delivery of DNA, such as but not limited to, topical application of non-cationic liposome-DNA complex, cationic liposome-DNA complex, particle-mediated (gene gun), puncture-mediated gene transfections, and viral delivery approaches. After delivery of the nucleic acid, gene products have been detected in a number of different skin cell types, including, but not limited to, basal keratinocytes, sebaceous gland cells, dermal fibroblasts and dermal macrophages.

[0779] In one embodiment, the invention provides for a variety of dressings (e.g., wound dressings) or bandages (e.g., adhesive bandages) for conveniently and/or effectively carrying out methods of the present invention. Typically dressing or bandages may comprise sufficient amounts of pharmaceutical compositions and/or polynucleotides, modified nucleic acids, enhanced modified RNA or ribonucleic acids described herein to allow a user to perform multiple treatments of a subject(s).

[0780] In one embodiment, the invention provides for the polynucleotides, modified nucleic acids, enhanced modified RNA or ribonucleic acids compositions to be delivered in more than one injection.

[0781] In one embodiment, before topical and/or transdermal administration at least one area of tissue, such as skin, may be subjected to a device and/or solution which may increase permeability. In one embodiment, the tissue may be subjected to an abrasion device to increase the permeability of the skin (see U.S. Patent Publication No. 20080275468, herein incorporated by reference in its entirety). In another embodiment, the tissue may be subjected to an ultrasound enhancement device. An ultrasound enhancement device may include, but is not limited to, the devices described in U.S. Publication No. 20040236268 and U.S. Pat. Nos. 6,491,657 and 6,234,990; each of which are herein incorporated by reference in their entireties. Methods of enhancing the permeability of tissue are described in U.S. Publication Nos. 20040171980 and 20040236268 and U.S. Pat. No. 6,190,315; each of which are herein incorporated by reference in their entireties.

[0782] In one embodiment, a device may be used to increase permeability of tissue before delivering formulations of modified mRNA described herein. The permeability of skin may be measured by methods known in the art and/or described in U.S. Pat. No. 6,190,315, herein incorporated by reference in its entirety. As a non-limiting example, a modified mRNA formulation may be delivered by the drug delivery methods described in U.S. Pat. No. 6,190,315, herein incorporated by reference in its entirety.

[0783] In another non-limiting example tissue may be treated with a eutectic mixture of local anesthetics (EMLA) cream before, during and/or after the tissue may be subjected to a device which may increase permeability. Katz et al. (Anesth Analg (2004); 98:371-76; herein incorporated by reference in its entirety) showed that using the EMLA cream in combination with a low energy, an onset of superficial cutaneous analgesia was seen as fast as 5 minutes after a pretreatment with a low energy ultrasound.

[0784] In one embodiment, enhancers may be applied to the tissue before, during, and/or after the tissue has been treated to increase permeability. Enhancers include, but are not limited to, transport enhancers, physical enhancers, and cavitation enhancers. Non-limiting examples of enhancers are described in U.S. Pat. No. 6,190,315, herein incorporated by reference in its entirety.

[0785] In one embodiment, a device may be used to increase permeability of tissue before delivering formulations of modified mRNA described herein, which may further contain a substance that invokes an immune response. In another non-limiting example, a formulation containing a substance to invoke an immune response may be delivered by the methods described in U.S. Publication Nos. 20040171980 and 20040236268; each of which are herein incorporated by reference in their entireties.

[0786] Dosage forms for topical and/or transdermal administration of a composition may include ointments, pastes, creams, lotions, gels, powders, solutions, sprays, inhalants and/or patches. Generally, an active ingredient is admixed under sterile conditions with a pharmaceutically acceptable excipient and/or any needed preservatives and/or buffers as may be required. Additionally, the present invention contemplates the use of transdermal patches, which often have the added advantage of providing controlled delivery of a compound to the body. Such dosage forms may be prepared, for example, by dissolving and/or dispensing the compound in the proper medium. Alternatively or additionally, rate may be controlled by either providing a rate controlling membrane and/or by dispersing the compound in a polymer matrix and/or gel.

[0787] Formulations suitable for topical administration include, but are not limited to, liquid and/or semi liquid preparations such as liniments, lotions, oil in water and/or water in oil emulsions such as creams, ointments and/or pastes, and/or solutions and/or suspensions.

[0788] Topically-administrable formulations may, for example, comprise from about 0.1% to about 10% (w/w) active ingredient, although the concentration of active ingredient may be as high as the solubility limit of the active ingredient in the solvent. Formulations for topical administration may further comprise one or more of the additional ingredients described herein.

### Depot Administration

[0789] As described herein, in some embodiments, the composition is formulated in depots for extended release. Generally, a specific organ or tissue (a “target tissue”) is targeted for administration.

[0790] In some aspects of the invention, the nucleic acids (particularly ribonucleic acids encoding polypeptides) are spatially retained within or proximal to a target tissue. Provided are method of providing a composition to a target tissue of a mammalian subject by contacting the target tissue (which contains one or more target cells) with the composition under conditions such that the composition, in particular the nucleic acid component(s) of the composition, is substantially retained in the target tissue, meaning that at least 10, 20, 30, 40, 50, 60, 70, 80, 85, 90, 95, 96, 97, 98, 99, 99.9, 99.99 or greater than 99.99% of the composition is retained in the target tissue. Advantageously, retention is determined by measuring the amount of the nucleic acid present in the composition that enters one or more target cells. For example, at least 1, 5, 10, 20, 30, 40, 50, 60, 70, 80, 85, 90, 95, 96, 97, 98, 99, 99.9, 99.99 or greater than 99.99% of the nucleic acids administered to the subject are present intracellularly at a period of time following administration. For example, intramuscular injection to a mammalian subject is performed using an aqueous composition containing a ribonucleic acid and a transfection reagent, and retention of the composition is determined by measuring the amount of the ribonucleic acid present in the muscle cells.

[0791] Aspects of the invention are directed to methods of providing a composition to a target tissue of a mammalian subject, by contacting the target tissue (containing one or more target cells) with the composition under conditions such that the composition is substantially retained in the target tissue. In another embodiment, a polynucleotide, ribonucleic acid engineered to avoid an innate immune response of a cell into which the ribonucleic acid enters, where the ribonucleic acid contains a nucleotide sequence encoding a polypeptide of interest, under conditions such that the polypeptide of interest is produced in at least one target cell. The compositions generally contain a cell penetration agent, although “naked” nucleic acid (such as nucleic acids without a cell penetration agent or other agent) is also contemplated, and a pharmaceutically acceptable carrier.

[0792] In some circumstances, the amount of a protein produced by cells in a tissue is desirably increased. Preferably, this increase in protein production is spatially restricted to cells within the target tissue. Thus, provided are methods of increasing production of a protein of interest in a tissue of a mammalian subject. A composition is provided that contains a ribonucleic acid that is engineered to avoid an innate immune response of a cell into which the ribonucleic acid enters and encodes the polypeptide of interest and the composition is characterized in that a unit quantity of composition has been determined to produce the polypeptide of interest in a substantial percentage of cells contained within a predetermined volume of the target tissue.

[0793] In some embodiments, the composition includes a plurality of different ribonucleic acids, where one or more than one of the ribonucleic acids is engineered to avoid an innate immune response of a cell into which the ribonucleic acid enters, and where one or more than one of the ribonucleic acids encodes a polypeptide of interest. Optionally, the composition also contains a cell penetration agent to assist in the intracellular delivery of the ribonucleic acid. A determination is made of the dose of the composition required to produce the polypeptide of interest in a substantial percentage of cells contained within the predetermined volume of the target tissue (generally, without inducing significant production of the polypeptide of interest in tissue adjacent to the predetermined volume, or distally to the target tissue). Subsequent to this determination, the determined dose is introduced directly into the tissue of the mammalian subject.

[0794] In one embodiment, the invention provides for the polynucleotides, modified nucleic acids, enhanced modified RNA or ribonucleic acids to be delivered in more than one injection or by split dose injections.

[0795] In one embodiment, the invention may be retained near target tissue using a small disposable drug reservoir or patch pump. Non-limiting examples of patch pumps include those manufactured and/or sold by BD®, (Franklin Lakes, N.J.), Insulet Corporation (Bedford, Mass.), SteadyMed Therapeutics (San Francisco, Calif.), Medtronic (Minneapolis, Minn.), UniLife (York, Pa.), Valeritas (Bridgewater, N.J.), and SpringLeaf Therapeutics (Boston, Mass.).

### Pulmonary Administration

[0796] A pharmaceutical composition may be prepared, packaged, and/or sold in a formulation suitable for pulmonary administration via the buccal cavity. Such a formulation may comprise dry particles which comprise the active ingredient and which have a diameter in the range from about 0.5 nm to about 7 nm or from about 1 nm to about 6 nm. Such compositions are suitably in the form of dry powders for administration using a device comprising a dry powder reservoir to which a stream of propellant may be directed to disperse the powder and/or using a self propelling solvent/powder dispensing container such as a device comprising the active ingredient dissolved and/or suspended in a low-boiling propellant in a sealed container. Such powders comprise particles wherein at least 98% of the particles by weight have a diameter greater than 0.5 nm and at least 95% of the particles by number have a diameter less than 7 nm. Alternatively, at least 95% of the particles by weight have a diameter greater than 1 nm and at least 90% of the particles by number have a diameter less than 6 nm. Dry powder compositions may include a solid fine powder diluent such as sugar and are conveniently provided in a unit dose form.

[0797] Low boiling propellants generally include liquid propellants having a boiling point of below 65° F. at atmospheric pressure. Generally the propellant may constitute 50% to 99.9% (w/w) of the composition, and active ingredient may constitute 0.1% to 20% (w/w) of the composition. A propellant may further comprise additional ingredients such as a liquid non-ionic and/or solid anionic surfactant and/or a solid diluent (which may have a particle size of the same order as particles comprising the active ingredient).

[0798] Pharmaceutical compositions formulated for pulmonary delivery may provide an active ingredient in the form of droplets of a solution and/or suspension. Such formulations may be prepared, packaged, and/or sold as aqueous and/or dilute alcoholic solutions and/or suspensions, optionally sterile, comprising active ingredient, and may conveniently be administered using any nebulization and/or atomization device. Such formulations may further comprise one or more additional ingredients including, but not limited to, a flavoring agent such as saccharin sodium, a volatile oil, a buffering agent, a surface active agent, and/or a preservative such as methylhydroxybenzoate. Droplets provided by this route of administration may have an average diameter in the range from about 0.1 nm to about 200 nm.

### Intranasal, Nasal and Buccal Administration

[0799] Formulations described herein as being useful for pulmonary delivery are useful for intranasal delivery of a pharmaceutical composition. Another formulation suitable for intranasal administration is a coarse powder comprising the active ingredient and having an average particle from about 0.2 μm to 500 μm. Such a formulation is administered in the manner in which snuff is taken, i.e. by rapid inhalation through the nasal passage from a container of the powder held close to the nose.

[0800] Formulations suitable for nasal administration may, for example, comprise from about as little as 0.1% (w/w) and as much as 100% (w/w) of active ingredient, and may comprise one or more of the additional ingredients described herein. A pharmaceutical composition may be prepared, packaged, and/or sold in a formulation suitable for buccal administration. Such formulations may, for example, be in the form of tablets and/or lozenges made using conventional methods, and may, for example, 0.1% to 20% (w/w) active ingredient, the balance comprising an orally dissolvable and/or degradable composition and, optionally, one or more of the additional ingredients described herein. Alternately, formulations suitable for buccal administration may comprise a powder and/or an aerosolized and/or atomized solution and/or suspension comprising active ingredient. Such powdered, aerosolized, and/or aerosolized formulations, when dispersed, may have an average particle and/or droplet size in the range from about 0.1 nm to about 200 nm, and may further comprise one or more of any additional ingredients described herein

### Ophthalmic Administration

[0801] A pharmaceutical composition may be prepared, packaged, and/or sold in a formulation suitable for ophthalmic administration. Such formulations may, for example, be in the form of eye drops including, for example, a 0.1/1.0% (w/w) solution and/or suspension of the active ingredient in an aqueous or oily liquid excipient. Such drops may further comprise buffering agents, salts, and/or one or more other of any additional ingredients described herein. Other ophthalmically-administrable formulations which are useful include those which comprise the active ingredient in microcrystalline form and/or in a liposomal preparation. Ear drops and/or eye drops are contemplated as being within the scope of this invention.

### Payload Administration: Detectable Agents and Therapeutic Agents

[0802] The polynucleotides, modified nucleic acids, enhanced modified RNA or ribonucleic acids described herein can be used in a number of different scenarios in which delivery of a substance (the “payload”) to a biological target is desired, for example delivery of detectable substances for detection of the target, or delivery of a therapeutic agent. Detection methods can include, but are not limited to, both imaging in vitro and in vivo imaging methods, e.g., immunohistochemistry, bioluminescence imaging (BLI), Magnetic Resonance Imaging (MRI), positron emission tomography (PET), electron microscopy, X-ray computed tomography, Raman imaging, optical coherence tomography, absorption imaging, thermal imaging, fluorescence reflectance imaging, fluorescence microscopy, fluorescence molecular tomographic imaging, nuclear magnetic resonance imaging, X-ray imaging, ultrasound imaging, photoacoustic imaging, lab assays, or in any situation where tagging/staining/imaging is required.

[0803] The polynucleotides, modified nucleic acids, enhanced modified RNA or ribonucleic acids can be designed to include both a linker and a payload in any useful orientation. For example, a linker having two ends is used to attach one end to the payload and the other end to the nucleobase, such as at the C-7 or C-8 positions of the deaza-adenosine or deaza-guanosine or to the N-3 or C-5 positions of cytosine or uracil. The polynucleotide of the invention can include more than one payload (e.g., a label and a transcription inhibitor), as well as a cleavable linker.

[0804] In one embodiment, the modified nucleotide is a modified 7-deaza-adenosine triphosphate, where one end of a cleavable linker is attached to the C7 position of 7-deaza-adenine, the other end of the linker is attached to an inhibitor (e.g., to the C5 position of the nucleobase on a cytidine), and a label (e.g., Cy5) is attached to the center of the linker (see, e.g., compound 1 of A*pCp C5 Parg Capless in FIG. 5 and columns 9 and 10 of U.S. Pat. No. 7,994,304, incorporated herein by reference). Upon incorporation of the modified 7-deaza-adenosine triphosphate to an encoding region, the resulting polynucleotide having a cleavable linker attached to a label and an inhibitor (e.g., a polymerase inhibitor). Upon cleavage of the linker (e.g., with reductive conditions to reduce a linker having a cleavable disulfide moiety), the label and inhibitor are released. Additional linkers and payloads (e.g., therapeutic agents, detectable labels, and cell penetrating payloads) are described herein.

[0805] For example, the polynucleotides, modified nucleic acids, enhanced modified RNA or ribonucleic acids described herein can be used in reprogramming induced pluripotent stem cells (iPS cells), which can directly track cells that are transfected compared to total cells in the cluster. In another example, a drug that may be attached to the modified nucleic acids, enhanced modified RNA or ribonucleic acids via a linker and may be fluorescently labeled can be used to track the drug in vivo, e.g. intracellularly. Other examples include, but are not limited to, the use of polynucleotides, modified nucleic acids, enhanced modified RNA or ribonucleic acids in reversible drug delivery into cells.

[0806] The polynucleotides, modified nucleic acids, enhanced modified RNA or ribonucleic acids described herein can be used in intracellular targeting of a payload, e.g., detectable or therapeutic agent, to specific organelle. Exemplary intracellular targets can include, but are not limited to, the nuclear localization for advanced mRNA processing, or a nuclear localization sequence (NLS) linked to the mRNA containing an inhibitor.

[0807] In addition, the polynucleotides, modified nucleic acids, enhanced modified RNA or ribonucleic acids described herein can be used to deliver therapeutic agents to cells or tissues, e.g., in living animals. For example, the polynucleotides, modified nucleic acids, enhanced modified RNA or ribonucleic acids described herein can be used to deliver highly polar chemotherapeutics agents to kill cancer cells. The polynucleotides, modified nucleic acids, enhanced modified RNA or ribonucleic acids attached to the therapeutic agent through a linker can facilitate member permeation allowing the therapeutic agent to travel into a cell to reach an intracellular target.

[0808] In another example, the polynucleotides, modified nucleic acids, enhanced modified RNA or ribonucleic acids can be attached to the polynucleotides, modified nucleic acids, enhanced modified RNA or ribonucleic acids a viral inhibitory peptide (VIP) through a cleavable linker. The cleavable linker can release the VIP and dye into the cell. In another example, the polynucleotides, modified nucleic acids, enhanced modified RNA or ribonucleic acids can be attached through the linker to an ADP-ribosylate, which is responsible for the actions of some bacterial toxins, such as cholera toxin, diphtheria toxin, and pertussis toxin. These toxin proteins are ADP-ribosyltransferases that modify target proteins in human cells. For example, cholera toxin ADP-ribosylates G proteins modifies human cells by causing massive fluid secretion from the lining of the small intestine, which results in life-threatening diarrhea.

[0809] In some embodiments, the payload may be a therapeutic agent such as a cytotoxin, radioactive ion, chemotherapeutic, or other therapeutic agent. A cytotoxin or cytotoxic agent includes any agent that may be detrimental to cells. Examples include, but are not limited to, taxol, cytochalasin B, gramicidin D, ethidium bromide, emetine, mitomycin, etoposide, teniposide, vincristine, vinblastine, colchicine, doxorubicin, daunorubicin, dihydroxyanthracinedione, mitoxantrone, mithramycin, actinomycin D, 1-dehydrotestosterone, glucocorticoids, procaine, tetracaine, lidocaine, propranolol, puromycin, maytansinoids, e.g., maytansinol (see U.S. Pat. No. 5,208,020 incorporated herein in its entirety), rachelmycin (CC-1065, see U.S. Pat. Nos. 5,475,092, 5,585,499, and 5,846,545, all of which are incorporated herein by reference), and analogs or homologs thereof. Radioactive ions include, but are not limited to iodine (e.g., iodine 125 or iodine 131), strontium 89, phosphorous, palladium, cesium, iridium, phosphate, cobalt, yttrium 90, samarium 153, and praseodymium. Other therapeutic agents include, but are not limited to, antimetabolites (e.g., methotrexate, 6-mercaptopurine, 6-thioguanine, cytarabine, 5-fluorouracil decarbazine), alkylating agents (e.g., mechlorethamine, thiotepa chlorambucil, rachelmycin (CC-1065), melphalan, carmustine (BSNU), lomustine (CCNU), cyclophosphamide, busulfan, dibromomannitol, streptozotocin, mitomycin C, and cis-dichlorodiamine platinum (II) (DDP) cisplatin), anthracyclines (e.g., daunorubicin (formerly daunomycin) and doxorubicin), antibiotics (e.g., dactinomycin (formerly actinomycin), bleomycin, mithramycin, and anthramycin (AMC)), and anti-mitotic agents (e.g., vincristine, vinblastine, taxol and maytansinoids).

[0810] In some embodiments, the payload may be a detectable agent, such as various organic small molecules, inorganic compounds, nanoparticles, enzymes or enzyme substrates, fluorescent materials, luminescent materials (e.g., luminol), bioluminescent materials (e.g., luciferase, luciferin, and aequorin), chemiluminescent materials, radioactive materials (e.g., ¹⁸F, ⁶⁷Ga, ^{81m}Kr, ⁸²Rb, ¹¹¹In, ¹²³I, ¹³³Xe, ²⁰¹Tl, ¹²⁵I, ³⁵S, ¹⁴C, ³H, or ^{99m}Tc (e.g., as pertechnetate (technetate(VII), TcO₄⁻)), and contrast agents (e.g., gold (e.g., gold nanoparticles), gadolinium (e.g., chelated Gd), iron oxides (e.g., superparamagnetic iron oxide (SPIO), monocrystalline iron oxide nanoparticles (MIONs), and ultrasmall superparamagnetic iron oxide (USPIO)), manganese chelates (e.g., Mn-DPDP), barium sulfate, iodinated contrast media (iohexol), microbubbles, or perfluorocarbons). Such optically-detectable labels include for example, without limitation, 4-acetamido-4′-isothiocyanatostilbene-2,2′disulfonic acid; acridine and derivatives (e.g., acridine and acridine isothiocyanate); 5-(2′-aminoethyl)aminonaphthalene-1-sulfonic acid (EDANS); 4-amino-N-[3-vinylsulfonyl)phenyl]naphthalimide-3,5 disulfonate; N-(4-anilino-1-naphthyl)maleimide; anthranilamide; BODIPY; Brilliant Yellow; coumarin and derivatives (e.g., coumarin, 7-amino-4-methylcoumarin (AMC, Coumarin 120), and 7-amino-4-trifluoromethylcoumarin (Coumarin 151)); cyanine dyes; cyanosine; 4′,6-diaminidino-2-phenylindole (DAPI); 5′5″-dibromopyrogallol-sulfonaphthalein (Bromopyrogallol Red); 7-diethylamino-3-(4′-isothiocyanatophenyl)-4-methylcoumarin; diethylenetriamine pentaacetate; 4,4′-diisothiocyanatodihydro-stilbene-2,2′-disulfonic acid; 4,4′-diisothiocyanatostilbene-2,2′-disulfonic acid; 5-[dimethylamino]-naphthalene-1-sulfonyl chloride (DNS, dansylchloride); 4-dimethylaminophenylazophenyl-4′-isothiocyanate (DABITC); eosin and derivatives (e.g., eosin and eosin isothiocyanate); erythrosin and derivatives (e.g., erythrosin B and erythrosin isothiocyanate); ethidium; fluorescein and derivatives (e.g., 5-carboxyfluorescein (FAM), 5-(4,6-dichlorotriazin-2-yl)aminofluorescein (DTAF), 2′,7′-dimethoxy-4′5′-dichloro-6-carboxyfluorescein, fluorescein, fluorescein isothiocyanate, X-rhodamine-5-(and -6)-isothiocyanate (QFITC or XRITC), and fluorescamine); 2-[2-[3-[[1,3-dihydro-1,1-dimethyl-3-(3-sulfopropyl)-2H-benz[e]indol-2-ylidene]ethylidene]-2-[4-(ethoxycarbonyl)-1-piperazinyl]-1-cyclopenten-1-yl]ethenyl]-1,1-dimethyl-3-(3-sulforpropyl)-1H-benz[e]indolium hydroxide, inner salt, compound with n,n-diethylethanamine(1:1) (IR144); 5-chloro-2-[2-[3-[(5-chloro-3-ethyl-2(3H)-benzothiazol-ylidene)ethylidene]-2-(diphenylamino)-1-cyclopenten-1-yl]ethenyl]-3-ethyl benzothiazolium perchlorate (IR140); Malachite Green isothiocyanate; 4-methylumbelliferone orthocresolphthalein; nitrotyrosine; pararosaniline; Phenol Red; B-phycoerythrin; o-phthaldialdehyde; pyrene and derivatives (e.g., pyrene, pyrene butyrate, and succinimidyl 1-pyrene); butyrate quantum dots; Reactive Red 4 (Cibacron™ Brilliant Red 3B-A); rhodamine and derivatives (e.g., 6-carboxy-X-rhodamine (ROX), 6-carboxyrhodamine (R6G), lissamine rhodamine B sulfonyl chloride rhodarnine (Rhod), rhodamine B, rhodamine 123, rhodamine X isothiocyanate, sulforhodamine B, sulforhodamine 101, sulfonyl chloride derivative of sulforhodamine 101 (Texas Red), N,N,N′,N′letramethyl-6-carboxyrhodamine (TAMRA) tetramethyl rhodamine, and tetramethyl rhodamine isothiocyanate (TRITC)); riboflavin; rosolic acid; terbium chelate derivatives; Cyanine-3 (Cy3); Cyanine-5 (Cy5); cyanine-5.5 (Cy5.5), Cyanine-7 (Cy7); IRD 700; IRD 800; Alexa 647; La Jolta Blue; phthalo cyanine; and naphthalo cyanine.

[0811] In some embodiments, the detectable agent may be a non-detectable pre-cursor that becomes detectable upon activation (e.g., fluorogenic tetrazine-fluorophore constructs (e.g., tetrazine-BODIPY FL, tetrazine-Oregon Green 488, or tetrazine-BODIPY TMR-X) or enzyme activatable fluorogenic agents (e.g., PROSENSE® (VisEn Medical))). In vitro assays in which the enzyme labeled compositions can be used include, but are not limited to, enzyme linked immunosorbent assays (ELISAs), immunoprecipitation assays, immunofluorescence, enzyme immunoassays (EIA), radioimmunoassays (RIA), and Western blot analysis. Combination

[0812] The modified nucleic acids, enhanced modified RNA or ribonucleic acids may be used in combination with one or more other therapeutic, prophylactic, diagnostic, or imaging agents. By “in combination with,” it is not intended to imply that the agents must be administered at the same time and/or formulated for delivery together, although these methods of delivery are within the scope of the present disclosure. Compositions can be administered concurrently with, prior to, or subsequent to, one or more other desired therapeutics or medical procedures. In general, each agent will be administered at a dose and/or on a time schedule determined for that agent. In some embodiments, the present disclosure encompasses the delivery of pharmaceutical, prophylactic, diagnostic, or imaging compositions in combination with agents that may improve their bioavailability, reduce and/or modify their metabolism, inhibit their excretion, and/or modify their distribution within the body. As a non-limiting example, the modified nucleic acids, enhanced modified RNA or ribonucleic acids may be used in combination with a pharmaceutical agent for the treatment of cancer or to control hyperproliferative cells. In U.S. Pat. No. 7,964,571, herein incorporated by reference in its entirety, a combination therapy for the treatment of solid primary or metastasized tumor is described using a pharmaceutical composition including a DNA plasmid encoding for interleukin-12 with a lipopolymer and also administering at least one anticancer agent or chemotherapeutic. Further, the modified nucleic acids, enhanced modified RNA or ribonucleic acids of the present invention that encodes anti-proliferative molecules may be in a pharmaceutical composition with a lipopolymer (see e.g., U.S. Pub. No. 20110218231, herein incorporated by reference in its entirety, claiming a pharmaceutical composition comprising a DNA plasmid encoding an anti-proliferative molecule and a lipopolymer) which may be administered with at least one chemotherapeutic or anticancer agent.

### Payload Administration: Cell Penetrating Payload

[0813] In some embodiments, the polynucleotides, modified nucleotides and modified nucleic acid molecules, which are incorporated into a nucleic acid, e.g., RNA or mRNA, can also include a payload that can be a cell penetrating moiety or agent that enhances intracellular delivery of the compositions. For example, the compositions can include, but are not limited to, a cell-penetrating peptide sequence that facilitates delivery to the intracellular space, e.g., HIV-derived TAT peptide, penetratins, transportans, or hCT derived cell-penetrating peptides, see, e.g., Caron et al., (2001) Mol Ther. 3(3):310-8; Langel, Cell-Penetrating Peptides: Processes and Applications (CRC Press, Boca Raton Fla. 2002); El-Andaloussi et al., (2005) Curr Pharm Des. 11(28):3597-611; and Deshayes et al., (2005) Cell Mol Life Sci. 62(16):1839-49; all of which are incorporated herein by reference. The compositions can also be formulated to include a cell penetrating agent, e.g., liposomes, which enhance delivery of the compositions to the intracellular space.

### Payload Administration: Biological Target

[0814] The modified nucleotides and modified nucleic acid molecules described herein, which are incorporated into a nucleic acid, e.g., RNA or mRNA, can be used to deliver a payload to any biological target for which a specific ligand exists or can be generated. The ligand can bind to the biological target either covalently or non-covalently.

[0815] Examples of biological targets include, but are not limited to, biopolymers, e.g., antibodies, nucleic acids such as RNA and DNA, proteins, enzymes; examples of proteins include, but are not limited to, enzymes, receptors, and ion channels. In some embodiments the target may be a tissue- or a cell-type specific marker, e.g., a protein that is expressed specifically on a selected tissue or cell type. In some embodiments, the target may be a receptor, such as, but not limited to, plasma membrane receptors and nuclear receptors; more specific examples include, but are not limited to, G-protein-coupled receptors, cell pore proteins, transporter proteins, surface-expressed antibodies, HLA proteins, MHC proteins and growth factor receptors.

### Dosing

[0816] The present invention provides methods comprising administering modified mRNAs and their encoded proteins or complexes in accordance with the invention to a subject in need thereof. Nucleic acids, proteins or complexes, or pharmaceutical, imaging, diagnostic, or prophylactic compositions thereof, may be administered to a subject using any amount and any route of administration effective for preventing, treating, diagnosing, or imaging a disease, disorder, and/or condition (e.g., a disease, disorder, and/or condition relating to working memory deficits). The exact amount required will vary from subject to subject, depending on the species, age, and general condition of the subject, the severity of the disease, the particular composition, its mode of administration, its mode of activity, and the like. Compositions in accordance with the invention are typically formulated in dosage unit form for ease of administration and uniformity of dosage. It will be understood, however, that the total daily usage of the compositions of the present invention may be decided by the attending physician within the scope of sound medical judgment. The specific therapeutically effective, prophylactically effective, or appropriate imaging dose level for any particular patient will depend upon a variety of factors including the disorder being treated and the severity of the disorder; the activity of the specific compound employed; the specific composition employed; the age, body weight, general health, sex and diet of the patient; the time of administration, route of administration, and rate of excretion of the specific compound employed; the duration of the treatment; drugs used in combination or coincidental with the specific compound employed; and like factors well known in the medical arts.

[0817] In certain embodiments, compositions in accordance with the present invention may be administered at dosage levels sufficient to deliver from about 0.0001 mg/kg to about 100 mg/kg, from about 0.001 mg/kg to about 0.05 mg/kg, from about 0.005 mg/kg to about 0.05 mg/kg, from about 0.001 mg/kg to about 0.005 mg/kg, from about 0.05 mg/kg to about 0.5 mg/kg, from about 0.01 mg/kg to about 50 mg/kg, from about 0.1 mg/kg to about 40 mg/kg, from about 0.5 mg/kg to about 30 mg/kg, from about 0.01 mg/kg to about 10 mg/kg, from about 0.1 mg/kg to about 10 mg/kg, or from about 1 mg/kg to about 25 mg/kg, of subject body weight per day, one or more times a day, to obtain the desired therapeutic, diagnostic, prophylactic, or imaging effect. The desired dosage may be delivered three times a day, two times a day, once a day, every other day, every third day, every week, every two weeks, every three weeks, or every four weeks. In certain embodiments, the desired dosage may be delivered using multiple administrations (e.g., two, three, four, five, six, seven, eight, nine, ten, eleven, twelve, thirteen, fourteen, or more administrations).

[0818] According to the present invention, it has been discovered that administration of modified nucleic acids, enhanced modified RNA or ribonucleic acids in split-dose regimens produce higher levels of proteins in mammalian subjects. As used herein, a “split dose” is the division of single unit dose or total daily dose into two or more doses, e.g, two or more administrations of the single unit dose. As used herein, a “single unit dose” is a dose of any therapeutic administered in one dose/at one time/single route/single point of contact, i.e., single administration event. As used herein, a “total daily dose” is an amount given or prescribed in 24 hr period. It may be administered as a single unit dose. In one embodiment, the modified nucleic acids, enhanced modified RNA or ribonucleic acids of the present invention are administered to a subject in split doses. The modified nucleic acids, enhanced modified RNA or ribonucleic acids may be formulated in buffer only or in a formulation described herein.

### Dosage Forms

[0819] A pharmaceutical composition described herein can be formulated into a dosage form described herein, such as a topical, intranasal, intratracheal, or injectable (e.g., intravenous, intraocular, intravitreal, intramuscular, intracardiac, intraperitoneal, subcutaneous).

### Liquid Dosage Forms

[0820] Liquid dosage forms for parenteral administration include, but are not limited to, pharmaceutically acceptable emulsions, microemulsions, solutions, suspensions, syrups, and/or elixirs. In addition to active ingredients, liquid dosage forms may comprise inert diluents commonly used in the art including, but not limited to, water or other solvents, solubilizing agents and emulsifiers such as ethyl alcohol, isopropyl alcohol, ethyl carbonate, ethyl acetate, benzyl alcohol, benzyl benzoate, propylene glycol, 1,3-butylene glycol, dimethylformamide, oils (in particular, cottonseed, groundnut, corn, germ, olive, castor, and sesame oils), glycerol, tetrahydrofurfuryl alcohol, polyethylene glycols and fatty acid esters of sorbitan, and mixtures thereof. In certain embodiments for parenteral administration, compositions may be mixed with solubilizing agents such as CREMOPHOR®, alcohols, oils, modified oils, glycols, polysorbates, cyclodextrins, polymers, and/or combinations thereof.

### Injectable

[0821] Injectable preparations, for example, sterile injectable aqueous or oleaginous suspensions may be formulated according to the known art and may include suitable dispersing agents, wetting agents, and/or suspending agents. Sterile injectable preparations may be sterile injectable solutions, suspensions, and/or emulsions in nontoxic parenterally acceptable diluents and/or solvents, for example, a solution in 1,3-butanediol. Among the acceptable vehicles and solvents that may be employed include, but are not limited to, are water, Ringer's solution, U.S.P., and isotonic sodium chloride solution. Sterile, fixed oils are conventionally employed as a solvent or suspending medium. For this purpose any bland fixed oil can be employed including synthetic mono- or diglycerides. Fatty acids such as oleic acid can be used in the preparation of injectables.

[0822] Injectable formulations can be sterilized, for example, by filtration through a bacterial-retaining filter, and/or by incorporating sterilizing agents in the form of sterile solid compositions which can be dissolved or dispersed in sterile water or other sterile injectable medium prior to use.

[0823] In order to prolong the effect of an active ingredient, it may be desirable to slow the absorption of the active ingredient from subcutaneous or intramuscular injection. This may be accomplished by the use of a liquid suspension of crystalline or amorphous material with poor water solubility. The rate of absorption of modified mRNA then depends upon its rate of dissolution which, in turn, may depend upon crystal size and crystalline form. Alternatively, delayed absorption of a parenterally administered modified mRNA may be accomplished by dissolving or suspending the modified mRNA in an oil vehicle. Injectable depot forms are made by forming microencapsule matrices of the modified mRNA in biodegradable polymers such as polylactide-polyglycolide. Depending upon the ratio of modified mRNA to polymer and the nature of the particular polymer employed, the rate of modified mRNA release can be controlled. Examples of other biodegradable polymers include, but are not limited to, poly(orthoesters) and poly(anhydrides). Depot injectable formulations may be prepared by entrapping the modified mRNA in liposomes or microemulsions which are compatible with body tissues.

### Pulmonary

[0824] Formulations described herein as being useful for pulmonary delivery may also be use for intranasal delivery of a pharmaceutical composition. Another formulation suitable for intranasal administration may be a coarse powder comprising the active ingredient and having an average particle from about 0.2 μm to 500 μm. Such a formulation may be administered in the manner in which snuff is taken, i.e. by rapid inhalation through the nasal passage from a container of the powder held close to the nose.

[0825] Formulations suitable for nasal administration may, for example, comprise from about as little as 0.1% (w/w) and as much as 100% (w/w) of active ingredient, and may comprise one or more of the additional ingredients described herein. A pharmaceutical composition may be prepared, packaged, and/or sold in a formulation suitable for buccal administration. Such formulations may, for example, be in the form of tablets and/or lozenges made using conventional methods, and may, for example, contain about 0.1% to 20% (w/w) active ingredient, where the balance may comprise an orally dissolvable and/or degradable composition and, optionally, one or more of the additional ingredients described herein. Alternately, formulations suitable for buccal administration may comprise a powder and/or an aerosolized and/or atomized solution and/or suspension comprising active ingredient. Such powdered, aerosolized, and/or aerosolized formulations, when dispersed, may have an average particle and/or droplet size in the range from about 0.1 nm to about 200 nm, and may further comprise one or more of any additional ingredients described herein.

[0826] General considerations in the formulation and/or manufacture of pharmaceutical agents may be found, for example, in Remington: The Science and Practice of Pharmacy 21^{st} ed., Lippincott Williams & Wilkins, 2005 (incorporated herein by reference in its entirety).

### Coatings or Shells

[0827] Solid dosage forms of tablets, dragees, capsules, pills, and granules can be prepared with coatings and shells such as enteric coatings and other coatings well known in the pharmaceutical formulating art. They may optionally comprise opacifying agents and can be of a composition that they release the active ingredient(s) only, or preferentially, in a certain part of the intestinal tract, optionally, in a delayed manner. Examples of embedding compositions which can be used include polymeric substances and waxes. Solid compositions of a similar type may be employed as fillers in soft and hard-filled gelatin capsules using such excipients as lactose or milk sugar as well as high molecular weight polyethylene glycols and the like.

### Kits

[0828] The invention provides a variety of kits for conveniently and/or effectively carrying out methods of the present invention. Typically kits will comprise sufficient amounts and/or numbers of components to allow a user to perform multiple treatments of a subject(s) and/or to perform multiple experiments.

[0829] In one aspect, the present invention provides kits for protein production, comprising a first modified nucleic acids, enhanced modified RNA or ribonucleic acids comprising a translatable region. The kit may further comprise packaging and instructions and/or a delivery agent to form a formulation composition. The delivery agent may comprise a saline, a buffered solution, a lipidoid or any delivery agent disclosed herein.

[0830] In one embodiment, the buffer solution may include sodium chloride, calcium chloride, phosphate and/or EDTA. In another embodiment, the buffer solution may include, but is not limited to, saline, saline with 2 mM calcium, 5% sucrose, 5% sucrose with 2 mM calcium, 5% Mannitol, 5% Mannitol with 2 mM calcium, Ringer's lactate, sodium chloride, sodium chloride with 2 mM calcium. In a further embodiment, the buffer solutions may be precipitated or it may be lyophilized. The amount of each component may be varied to enable consistent, reproducible higher concentration saline or simple buffer formulations. The components may also be varied in order to increase the stability of modified RNA in the buffer solution over a period of time and/or under a variety of conditions.

[0831] In one aspect, the present invention provides kits for protein production, comprising: a modified nucleic acids, enhanced modified RNA or ribonucleic acids comprising a translatable region, provided in an amount effective to produce a desired amount of a protein encoded by the translatable region when introduced into a target cell; a second modified nucleic acids, enhanced modified RNA or ribonucleic acids comprising an inhibitory nucleic acid, provided in an amount effective to substantially inhibit the innate immune response of the cell; and packaging and instructions.

[0832] In one aspect, the present invention provides kits for protein production, comprising a modified nucleic acids, enhanced modified RNA or ribonucleic acids comprising a translatable region, wherein the nucleic acid exhibits reduced degradation by a cellular nuclease, and packaging and instructions.

[0833] In one aspect, the present invention provides kits for protein production, comprising a modified nucleic acids, enhanced modified RNA or ribonucleic acids comprising a translatable region, wherein the nucleic acid exhibits reduced degradation by a cellular nuclease, and a mammalian cell suitable for translation of the translatable region of the first nucleic acid

### Devices

[0834] The present invention provides for devices which may incorporate modified nucleic acids, enhanced modified RNA or ribonucleic acids that encode polypeptides of interest. These devices contain in a stable formulation the reagents to synthesize a nucleic acid in a formulation available to be immediately delivered to a subject in need thereof, such as a human patient. Non-limiting examples of such a polypeptide of interest include a growth factor and/or angiogenesis stimulator for wound healing, a peptide antibiotic to facilitate infection control, and an antigen to rapidly stimulate an immune response to a newly identified virus.

[0835] In some embodiments the device is self-contained, and is optionally capable of wireless remote access to obtain instructions for synthesis and/or analysis of the generated modified nucleic acids, enhanced modified RNA or ribonucleic acids. The device is capable of mobile synthesis of at least one modified nucleic acids, enhanced modified RNA or ribonucleic acids and preferably an unlimited number of different modified nucleic acids, enhanced modified RNA or ribonucleic acids. In certain embodiments, the device is capable of being transported by one or a small number of individuals. In other embodiments, the device is scaled to fit on a benchtop or desk. In other embodiments, the device is scaled to fit into a suitcase, backpack or similarly sized object. In another embodiment, the device may be a point of care or handheld device. In further embodiments, the device is scaled to fit into a vehicle, such as a car, truck or ambulance, or a military vehicle such as a tank or personnel carrier. The information necessary to generate a ribonucleic acid encoding polypeptide of interest is present within a computer readable medium present in the device.

[0836] In one embodiment, a device may be used to assess levels of a protein which has been administered in the form of a modified nucleic acids, enhanced modified RNA or ribonucleic acids. The device may comprise a blood, urine or other biofluidic test.

[0837] In some embodiments, the device is capable of communication (e.g., wireless communication) with a database of nucleic acid and polypeptide sequences. The device contains at least one sample block for insertion of one or more sample vessels. Such sample vessels are capable of accepting in liquid or other form any number of materials such as template DNA, nucleotides, enzymes, buffers, and other reagents. The sample vessels are also capable of being heated and cooled by contact with the sample block. The sample block is generally in communication with a device base with one or more electronic control units for the at least one sample block. The sample block preferably contains a heating module, such heating molecule capable of heating and/or cooling the sample vessels and contents thereof to temperatures between about −20 C and above +100 C. The device base is in communication with a voltage supply such as a battery or external voltage supply. The device also contains means for storing and distributing the materials for RNA synthesis.

[0838] Optionally, the sample block contains a module for separating the synthesized nucleic acids. Alternatively, the device contains a separation module operably linked to the sample block. Preferably the device contains a means for analysis of the synthesized nucleic acid. Such analysis includes sequence identity (demonstrated such as by hybridization), absence of non-desired sequences, measurement of integrity of synthesized mRNA (such has by microfluidic viscometry combined with spectrophotometry), and concentration and/or potency of modified nucleic acids, enhanced modified RNA or ribonucleic acids (such as by spectrophotometry).

[0839] In certain embodiments, the device is combined with a means for detection of pathogens present in a biological material obtained from a subject, e.g., the IBIS PLEX-ID system (Abbott, Abbott Park, Ill.) for microbial identification.

[0840] Suitable devices for use in delivering intradermal pharmaceutical compositions described herein include short needle devices such as those described in U.S. Pat. Nos. 4,886,499; 5,190,521; 5,328,483; 5,527,288; 4,270,537; 5,015,235; 5,141,496; and 5,417,662. Intradermal compositions may be administered by devices which limit the effective penetration length of a needle into the skin, such as those described in PCT publication WO 99/34850 and functional equivalents thereof. Jet injection devices which deliver liquid compositions to the dermis via a liquid jet injector and/or via a needle which pierces the stratum corneum and produces a jet which reaches the dermis are suitable. Jet injection devices are described, for example, in U.S. Pat. Nos. 5,480,381; 5,599,302; 5,334,144; 5,993,412; 5,649,912; 5,569,189; 5,704,911; 5,383,851; 5,893,397; 5,466,220; 5,339,163; 5,312,335; 5,503,627; 5,064,413; 5,520,639; 4,596,556; 4,790,824; 4,941,880; 4,940,460; and PCT publications WO 97/37705 and WO 97/13537. Ballistic powder/particle delivery devices which use compressed gas to accelerate vaccine in powder form through the outer layers of the skin to the dermis are suitable.

[0841] Alternatively or additionally, conventional syringes may be used in the classical mantoux method of intradermal administration.

[0842] In some embodiments, the device may be a pump or comprise a catheter for administration of compounds or compositions of the invention across the blood brain barrier. Such devices include but are not limited to a pressurized olfactory delivery device, iontophoresis devices, multi-layered microfluidic devices, and the like. Such devices may be portable or stationary. They may be implantable or externally tethered to the body or combinations thereof.

[0843] Devices for administration may be employed to deliver the modified nucleic acids, enhanced modified RNA or ribonucleic acids of the present invention according to single, multi- or split-dosing regimens taught herein. Such devices are described below.

[0844] Method and devices known in the art for multi-administration to cells, organs and tissues are contemplated for use in conjunction with the methods and compositions disclosed herein as embodiments of the present invention. These include, for example, those methods and devices having multiple needles, hybrid devices employing for example lumens or catheters as well as devices utilizing heat, electric current or radiation driven mechanisms.

[0845] According to the present invention, these multi-administration devices may be utilized to deliver the single, multi- or split doses contemplated herein.

[0846] A method for delivering therapeutic agents to a solid tissue has been described by Bahrami et al. and is taught for example in US Patent Publication 20110230839, the contents of which are incorporated herein by reference in their entirety. According to Bahrami, an array of needles is incorporated into a device which delivers a substantially equal amount of fluid at any location in said solid tissue along each needle's length.

[0847] A device for delivery of biological material across the biological tissue has been described by Kodgule et al. and is taught for example in US Patent Publication 20110172610, the contents of which are incorporated herein by reference in their entirety. According to Kodgule, multiple hollow micro-needles made of one or more metals and having outer diameters from about 200 microns to about 350 microns and lengths of at least 100 microns are incorporated into the device which delivers peptides, proteins, carbohydrates, nucleic acid molecules, lipids and other pharmaceutically active ingredients or combinations thereof.

[0848] A delivery probe for delivering a therapeutic agent to a tissue has been described by Gunday et al. and is taught for example in US Patent Publication 20110270184, the contents of which are incorporated herein by reference in their entirety. According to Gunday, multiple needles are incorporated into the device which moves the attached capsules between an activated position and an inactivated position to force the agent out of the capsules through the needles.

[0849] A multiple-injection medical apparatus has been described by Assaf and is taught for example in US Patent Publication 20110218497, the contents of which are incorporated herein by reference in their entirety. According to Assaf, multiple needles are incorporated into the device which has a chamber connected to one or more of said needles and a means for continuously refilling the chamber with the medical fluid after each injection.

[0850] In one embodiment, the modified nucleic acids, enhanced modified RNA or ribonucleic acids are administered subcutaneously or intramuscularly via at least 3 needles to three different, optionally adjacent, sites simultaneously, or within a 60 minutes period (e.g., administration to 4, 5, 6, 7, 8, 9, or 10 sites simultaneously or within a 60 minute period). The split doses can be administered simultaneously to adjacent tissue using the devices described in U.S. Patent Publication Nos. 20110230839 and 20110218497, each of which is incorporated herein by reference.

[0851] An at least partially implantable system for injecting a substance into a patient's body, in particular a penis erection stimulation system has been described by Forsell and is taught for example in US Patent Publication 20110196198, the contents of which are incorporated herein by reference in their entirety. According to Forsell, multiple needles are incorporated into the device which is implanted along with one or more housings adjacent the patient's left and right corpora cavernosa. A reservoir and a pump are also implanted to supply drugs through the needles.

[0852] A method for the transdermal delivery of a therapeutic effective amount of iron has been described by Berenson and is taught for example in US Patent Publication 20100130910, the contents of which are incorporated herein by reference in their entirety. According to Berenson, multiple needles may be used to create multiple micro channels in stratum corneum to enhance transdermal delivery of the ionic iron on an iontophoretic patch.

[0853] A method for delivery of biological material across the biological tissue has been described by Kodgule et al and is taught for example in US Patent Publication 20110196308, the contents of which are incorporated herein by reference in their entirety. According to Kodgule, multiple biodegradable microneedles containing a therapeutic active ingredient are incorporated in a device which delivers proteins, carbohydrates, nucleic acid molecules, lipids and other pharmaceutically active ingredients or combinations thereof.

[0854] A transdermal patch comprising a botulinum toxin composition has been described by Donovan and is taught for example in US Patent Publication 20080220020, the contents of which are incorporated herein by reference in their entirety. According to Donovan, multiple needles are incorporated into the patch which delivers botulinum toxin under stratum corneum through said needles which project through the stratum corneum of the skin without rupturing a blood vessel.

[0855] A small, disposable drug reservoir, or patch pump, which can hold approximately 0.2 to 15 mL of liquid formulations can be placed on the skin and deliver the formulation continuously subcutaneously using a small bore needed (e.g., 26 to 34 gauge). As non-limiting examples, the patch pump may be 50 mm by 76 mm by 20 mm spring loaded having a 30 to 34 gauge needle (BD™ Microinfuser, Franklin Lakes N.J.), 41 mm by 62 mm by 17 mm with a 2 mL reservoir used for drug delivery such as insulin (OMNIPOD®, Insulet Corporation Bedford, Mass.), or 43-60 mm diameter, 10 mm thick with a 0.5 to 10 mL reservoir (PATCHPUMP®, SteadyMed Therapeutics, San Francisco, Calif.). Further, the patch pump may be battery powered and/or rechargeable.

[0856] A cryoprobe for administration of an active agent to a location of cryogenic treatment has been described by Toubia and is taught for example in US Patent Publication 20080140061, the contents of which are incorporated herein by reference in their entirety. According to Toubia, multiple needles are incorporated into the probe which receives the active agent into a chamber and administers the agent to the tissue.

[0857] A method for treating or preventing inflammation or promoting healthy joints has been described by Stock et al and is taught for example in US Patent Publication 20090155186, the contents of which are incorporated herein by reference in their entirety. According to Stock, multiple needles are incorporated in a device which administers compositions containing signal transduction modulator compounds.

[0858] A multi-site injection system has been described by Kimmell et al. and is taught for example in US Patent Publication 20100256594, the contents of which are incorporated herein by reference in their entirety. According to Kimmell, multiple needles are incorporated into a device which delivers a medication into a stratum corneum through the needles.

[0859] A method for delivering interferons to the intradermal compartment has been described by Dekker et al. and is taught for example in US Patent Publication 20050181033, the contents of which are incorporated herein by reference in their entirety. According to Dekker, multiple needles having an outlet with an exposed height between 0 and 1 mm are incorporated into a device which improves pharmacokinetics and bioavailability by delivering the substance at a depth between 0.3 mm and 2 mm.

[0860] A method for delivering genes, enzymes and biological agents to tissue cells has described by Desai and is taught for example in US Patent Publication 20030073908, the contents of which are incorporated herein by reference in their entirety. According to Desai, multiple needles are incorporated into a device which is inserted into a body and delivers a medication fluid through said needles.

[0861] A method for treating cardiac arrhythmias with fibroblast cells has been described by Lee et al and is taught for example in US Patent Publication 20040005295, the contents of which are incorporated herein by reference in their entirety. According to Lee, multiple needles are incorporated into the device which delivers fibroblast cells into the local region of the tissue.

[0862] A method using a magnetically controlled pump for treating a brain tumor has been described by Shachar et al. and is taught for example in U.S. Pat. No. 7,799,012 (method) and 7,799,016 (device), the contents of which are incorporated herein by reference in their entirety. According Shachar, multiple needles were incorporated into the pump which pushes a medicating agent through the needles at a controlled rate.

[0863] Methods of treating functional disorders of the bladder in mammalian females have been described by Versi et al. and are taught for example in U.S. Pat. No. 8,029,496, the contents of which are incorporated herein by reference in their entirety. According to Versi, an array of micro-needles is incorporated into a device which delivers a therapeutic agent through the needles directly into the trigone of the bladder.

[0864] A micro-needle transdermal transport device has been described by Angel et al and is taught for example in U.S. Pat. No. 7,364,568, the contents of which are incorporated herein by reference in their entirety. According to Angel, multiple needles are incorporated into the device which transports a substance into a body surface through the needles which are inserted into the surface from different directions. The micro-needle transdermal transport device may be a solid micro-needle system or a hollow micro-needle system. As a non-limiting example, the solid micro-needle system may have up to a 0.5 mg capacity, with 300-1500 solid micro-needles per cm² about 150-700 μm tall coated with a drug. The micro-needles penetrate the stratum corneum and remain in the skin for short duration (e.g., 20 seconds to 15 minutes). In another example, the hollow micro-needle system has up to a 3 mL capacity to deliver liquid formulations using 15-20 microneedles per cm2 being approximately 950 μm tall. The micro-needles penetrate the skin to allow the liquid formulations to flow from the device into the skin. The hollow micro-needle system may be worn from 1 to 30 minutes depending on the formulation volume and viscosity.

[0865] A device for subcutaneous infusion has been described by Dalton et al and is taught for example in U.S. Pat. No. 7,150,726, the contents of which are incorporated herein by reference in their entirety. According to Dalton, multiple needles are incorporated into the device which delivers fluid through the needles into a subcutaneous tissue.

[0866] A device and a method for intradermal delivery of vaccines and gene therapeutic agents through microcannula have been described by Mikszta et al. and are taught for example in U.S. Pat. No. 7,473,247, the contents of which are incorporated herein by reference in their entirety. According to Mitszta, at least one hollow micro-needle is incorporated into the device which delivers the vaccines to the subject's skin to a depth of between 0.025 mm and 2 mm.

[0867] A method of delivering insulin has been described by Pettis et al and is taught for example in U.S. Pat. No. 7,722,595, the contents of which are incorporated herein by reference in their entirety. According to Pettis, two needles are incorporated into a device wherein both needles insert essentially simultaneously into the skin with the first at a depth of less than 2.5 mm to deliver insulin to intradermal compartment and the second at a depth of greater than 2.5 mm and less than 5.0 mm to deliver insulin to subcutaneous compartment.

[0868] Cutaneous injection delivery under suction has been described by Kochamba et al. and is taught for example in U.S. Pat. No. 6,896,666, the contents of which are incorporated herein by reference in their entirety. According to Kochamba, multiple needles in relative adjacency with each other are incorporated into a device which injects a fluid below the cutaneous layer.

[0869] A device for withdrawing or delivering a substance through the skin has been described by Down et al and is taught for example in U.S. Pat. No. 6,607,513, the contents of which are incorporated herein by reference in their entirety. According to Down, multiple skin penetrating members which are incorporated into the device have lengths of about 100 microns to about 2000 microns and are about 30 to 50 gauge.

[0870] A device for delivering a substance to the skin has been described by Palmer et al and is taught for example in U.S. Pat. No. 6,537,242, the contents of which are incorporated herein by reference in their entirety. According to Palmer, an array of micro-needles is incorporated into the device which uses a stretching assembly to enhance the contact of the needles with the skin and provides a more uniform delivery of the substance.

[0871] A perfusion device for localized drug delivery has been described by Zamoyski and is taught for example in U.S. Pat. No. 6,468,247, the contents of which are incorporated herein by reference in their entirety. According to Zamoyski, multiple hypodermic needles are incorporated into the device which injects the contents of the hypodermics into a tissue as said hypodermics are being retracted.

[0872] A method for enhanced transport of drugs and biological molecules across tissue by improving the interaction between micro-needles and human skin has been described by Prausnitz et al. and is taught for example in U.S. Pat. No. 6,743,211, the contents of which are incorporated herein by reference in their entirety. According to Prausnitz, multiple micro-needles are incorporated into a device which is able to present a more rigid and less deformable surface to which the micro-needles are applied.

[0873] A device for intraorgan administration of medicinal agents has been described by Ting et al and is taught for example in U.S. Pat. No. 6,077,251, the contents of which are incorporated herein by reference in their entirety. According to Ting, multiple needles having side openings for enhanced administration are incorporated into a device which by extending and retracting said needles from and into the needle chamber forces a medicinal agent from a reservoir into said needles and injects said medicinal agent into a target organ.

[0874] A multiple needle holder and a subcutaneous multiple channel infusion port has been described by Brown and is taught for example in U.S. Pat. No. 4,695,273, the contents of which are incorporated herein by reference in their entirety. According to Brown, multiple needles on the needle holder are inserted through the septum of the infusion port and communicate with isolated chambers in said infusion port.

[0875] A dual hypodermic syringe has been described by Horn and is taught for example in U.S. Pat. No. 3,552,394, the contents of which are incorporated herein by reference in their entirety. According to Horn, two needles incorporated into the device are spaced apart less than 68 mm and may be of different styles and lengths, thus enabling injections to be made to different depths.

[0876] A syringe with multiple needles and multiple fluid compartments has been described by Hershberg and is taught for example in U.S. Pat. No. 3,572,336, the contents of which are incorporated herein by reference in their entirety. According to Hershberg, multiple needles are incorporated into the syringe which has multiple fluid compartments and is capable of simultaneously administering incompatible drugs which are not able to be mixed for one injection.

[0877] A surgical instrument for intradermal injection of fluids has been described by Eliscu et al. and is taught for example in U.S. Pat. No. 2,588,623, the contents of which are incorporated herein by reference in their entirety. According to Eliscu, multiple needles are incorporated into the instrument which injects fluids intradermally with a wider disperse.

[0878] An apparatus for simultaneous delivery of a substance to multiple breast milk ducts has been described by Hung and is taught for example in EP 1818017, the contents of which are incorporated herein by reference in their entirety. According to Hung, multiple lumens are incorporated into the device which inserts though the orifices of the ductal networks and delivers a fluid to the ductal networks.

[0879] A catheter for introduction of medications to the tissue of a heart or other organs has been described by Tkebuchava and is taught for example in WO2006138109, the contents of which are incorporated herein by reference in their entirety. According to Tkebuchava, two curved needles are incorporated which enter the organ wall in a flattened trajectory.

[0880] Devices for delivering medical agents have been described by Mckay et al. and are taught for example in WO2006118804, the content of which are incorporated herein by reference in their entirety. According to Mckay, multiple needles with multiple orifices on each needle are incorporated into the devices to facilitate regional delivery to a tissue, such as the interior disc space of a spinal disc.

[0881] A method for directly delivering an immunomodulatory substance into an intradermal space within a mammalian skin has been described by Pettis and is taught for example in WO2004020014, the contents of which are incorporated herein by reference in their entirety. According to Pettis, multiple needles are incorporated into a device which delivers the substance through the needles to a depth between 0.3 mm and 2 mm.

[0882] Methods and devices for administration of substances into at least two compartments in skin for systemic absorption and improved pharmacokinetics have been described by Pettis et al. and are taught for example in WO2003094995, the contents of which are incorporated herein by reference in their entirety. According to Pettis, multiple needles having lengths between about 300 μm and about 5 mm are incorporated into a device which delivers to intradermal and subcutaneous tissue compartments simultaneously.

[0883] A drug delivery device with needles and a roller has been described by Zimmerman et al. and is taught for example in WO2012006259, the contents of which are incorporated herein by reference in their entirety. According to Zimmerman, multiple hollow needles positioned in a roller are incorporated into the device which delivers the content in a reservoir through the needles as the roller rotates.

Methods and Devices Utilizing Catheters and/or Lumens

[0884] Methods and devices using catheters and lumens may be employed to administer the modified nucleic acids, enhanced modified RNA or ribonucleic acids of the present invention on a single, multi- or split dosing schedule. Such methods and devices are described below.

[0885] A catheter-based delivery of skeletal myoblasts to the myocardium of damaged hearts has been described by Jacoby et al and is taught for example in US Patent Publication 20060263338, the contents of which are incorporated herein by reference in their entirety. According to Jacoby, multiple needles are incorporated into the device at least part of which is inserted into a blood vessel and delivers the cell composition through the needles into the localized region of the subject's heart.

[0886] An apparatus for treating asthma using neurotoxin has been described by Deem et al and is taught for example in US Patent Publication 20060225742, the contents of which are incorporated herein by reference in their entirety. According to Deem, multiple needles are incorporated into the device which delivers neurotoxin through the needles into the bronchial tissue.

[0887] A method for administering multiple-component therapies has been described by Nayak and is taught for example in U.S. Pat. No. 7,699,803, the contents of which are incorporated herein by reference in their entirety. According to Nayak, multiple injection cannulas may be incorporated into a device wherein depth slots may be included for controlling the depth at which the therapeutic substance is delivered within the tissue.

[0888] A surgical device for ablating a channel and delivering at least one therapeutic agent into a desired region of the tissue has been described by McIntyre et al and is taught for example in U.S. Pat. No. 8,012,096, the contents of which are incorporated herein by reference in their entirety. According to McIntyre, multiple needles are incorporated into the device which dispenses a therapeutic agent into a region of tissue surrounding the channel and is particularly well suited for transmyocardial revascularization operations.

[0889] Methods of treating functional disorders of the bladder in mammalian females have been described by Versi et al and are taught for example in U.S. Pat. No. 8,029,496, the contents of which are incorporated herein by reference in their entirety. According to Versi, an array of micro-needles is incorporated into a device which delivers a therapeutic agent through the needles directly into the trigone of the bladder.

[0890] A device and a method for delivering fluid into a flexible biological barrier have been described by Yeshurun et al. and are taught for example in U.S. Pat. No. 7,998,119 (device) and 8,007,466 (method), the contents of which are incorporated herein by reference in their entirety. According to Yeshurun, the micro-needles on the device penetrate and extend into the flexible biological barrier and fluid is injected through the bore of the hollow micro-needles.

[0891] A method for epicardially injecting a substance into an area of tissue of a heart having an epicardial surface and disposed within a torso has been described by Bonner et al and is taught for example in U.S. Pat. No. 7,628,780, the contents of which are incorporated herein by reference in their entirety. According to Bonner, the devices have elongate shafts and distal injection heads for driving needles into tissue and injecting medical agents into the tissue through the needles.

[0892] A device for sealing a puncture has been described by Nielsen et al and is taught for example in U.S. Pat. No. 7,972,358, the contents of which are incorporated herein by reference in their entirety. According to Nielsen, multiple needles are incorporated into the device which delivers a closure agent into the tissue surrounding the puncture tract.

[0893] A method for myogenesis and angiogenesis has been described by Chiu et al. and is taught for example in U.S. Pat. No. 6,551,338, the contents of which are incorporated herein by reference in their entirety. According to Chiu, 5 to 15 needles having a maximum diameter of at least 1.25 mm and a length effective to provide a puncture depth of 6 to 20 mm are incorporated into a device which inserts into proximity with a myocardium and supplies an exogeneous angiogenic or myogenic factor to said myocardium through the conduits which are in at least some of said needles.

[0894] A method for the treatment of prostate tissue has been described by Bolmsj et al. and is taught for example in U.S. Pat. No. 6,524,270, the contents of which are incorporated herein by reference in their entirety. According to Bolmsj, a device comprising a catheter which is inserted through the urethra has at least one hollow tip extendible into the surrounding prostate tissue. An astringent and analgesic medicine is administered through said tip into said prostate tissue.

[0895] A method for infusing fluids to an intraosseous site has been described by Findlay et al. and is taught for example in U.S. Pat. No. 6,761,726, the contents of which are incorporated herein by reference in their entirety. According to Findlay, multiple needles are incorporated into a device which is capable of penetrating a hard shell of material covered by a layer of soft material and delivers a fluid at a predetermined distance below said hard shell of material.

[0896] A device for injecting medications into a vessel wall has been described by Vigil et al. and is taught for example in U.S. Pat. No. 5,713,863, the contents of which are incorporated herein by reference in their entirety. According to Vigil, multiple injectors are mounted on each of the flexible tubes in the device which introduces a medication fluid through a multi-lumen catheter, into said flexible tubes and out of said injectors for infusion into the vessel wall.

[0897] A catheter for delivering therapeutic and/or diagnostic agents to the tissue surrounding a bodily passageway has been described by Faxon et al. and is taught for example in U.S. Pat. No. 5,464,395, the contents of which are incorporated herein by reference in their entirety. According to Faxon, at least one needle cannula is incorporated into the catheter which delivers the desired agents to the tissue through said needles which project outboard of the catheter.

[0898] Balloon catheters for delivering therapeutic agents have been described by Orr and are taught for example in WO2010024871, the contents of which are incorporated herein by reference in their entirety. According to Orr, multiple needles are incorporated into the devices which deliver the therapeutic agents to different depths within the tissue.

### Methods and Devices Utilizing Electrical Current

[0899] Methods and devices utilizing electric current may be employed to deliver the modified nucleic acids, enhanced modified RNA or ribonucleic acids of the present invention according to the single, multi- or split dosing regimens taught herein. Such methods and devices are described below.

[0900] An electro collagen induction therapy device has been described by Marquez and is taught for example in US Patent Publication 20090137945, the contents of which are incorporated herein by reference in their entirety. According to Marquez, multiple needles are incorporated into the device which repeatedly pierce the skin and draw in the skin a portion of the substance which is applied to the skin first.

[0901] An electrokinetic system has been described by Etheredge et al. and is taught for example in US Patent Publication 20070185432, the contents of which are incorporated herein by reference in their entirety. According to Etheredge, micro-needles are incorporated into a device which drives by an electrical current the medication through the needles into the targeted treatment site.

[0902] An iontophoresis device has been described by Matsumura et al. and is taught for example in U.S. Pat. No. 7,437,189, the contents of which are incorporated herein by reference in their entirety. According to Matsumura, multiple needles are incorporated into the device which is capable of delivering ionizable drug into a living body at higher speed or with higher efficiency.

[0903] Intradermal delivery of biologically active agents by needle-free injection and electroporation has been described by Hoffmann et al and is taught for example in U.S. Pat. No. 7,171,264, the contents of which are incorporated herein by reference in their entirety. According to Hoffmann, one or more needle-free injectors are incorporated into an electroporation device and the combination of needle-free injection and electroporation is sufficient to introduce the agent into cells in skin, muscle or mucosa.

[0904] A method for electropermeabilization-mediated intracellular delivery has been described by Lundkvist et al. and is taught for example in U.S. Pat. No. 6,625,486, the contents of which are incorporated herein by reference in their entirety. According to Lundkvist, a pair of needle electrodes is incorporated into a catheter. Said catheter is positioned into a body lumen followed by extending said needle electrodes to penetrate into the tissue surrounding said lumen. Then the device introduces an agent through at least one of said needle electrodes and applies electric field by said pair of needle electrodes to allow said agent pass through the cell membranes into the cells at the treatment site.

[0905] A delivery system for transdermal immunization has been described by Levin et al. and is taught for example in WO2006003659, the contents of which are incorporated herein by reference in their entirety. According to Levin, multiple electrodes are incorporated into the device which applies electrical energy between the electrodes to generate micro channels in the skin to facilitate transdermal delivery.

[0906] A method for delivering RF energy into skin has been described by Schomacker and is taught for example in WO2011163264, the contents of which are incorporated herein by reference in their entirety. According to Schomacker, multiple needles are incorporated into a device which applies vacuum to draw skin into contact with a plate so that needles insert into skin through the holes on the plate and deliver RF energy.

### DEFINITIONS

[0907] At various places in the present specification, substituents of compounds of the present disclosure are disclosed in groups or in ranges. It is specifically intended that the present disclosure include each and every individual subcombination of the members of such groups and ranges. For example, the term “C₁₋₆ alkyl” is specifically intended to individually disclose methyl, ethyl, C₃ alkyl, C₄ alkyl, C₅ alkyl, and C₆ alkyl.

[0908] About: As used herein, the term “about” means +/−10% of the recited value.

[0909] Animal: As used herein, the term “animal” refers to any member of the animal kingdom. In some embodiments, “animal” refers to humans at any stage of development. In some embodiments, “animal” refers to non-human animals at any stage of development. In certain embodiments, the non-human animal is a mammal (e.g., a rodent, a mouse, a rat, a rabbit, a monkey, a dog, a cat, a sheep, cattle, a primate, or a pig). In some embodiments, animals include, but are not limited to, mammals, birds, reptiles, amphibians, fish, and worms. In some embodiments, the animal is a transgenic animal, genetically-engineered animal, or a clone.

[0910] Approximately: As used herein, the term “approximately” or “about,” as applied to one or more values of interest, refers to a value that is similar to a stated reference value. In certain embodiments, the term “approximately” or “about” refers to a range of values that fall within 25%, 20%, 19%, 18%, 17%, 16%, 15%, 14%, 13%, 12%, 11%, 10%, 9%, 8%, 7%, 6%, 5%, 4%, 3%, 2%, 1%, or less in either direction (greater than or less than) of the stated reference value unless otherwise stated or otherwise evident from the context (except where such number would exceed 100% of a possible value).

[0911] Associated with: As used herein, the terms “associated with,” “conjugated,” “linked,” “attached,” and “tethered,” when used with respect to two or more moieties, means that the moieties are physically associated or connected with one another, either directly or via one or more additional moieties that serves as a linking agent, to form a structure that is sufficiently stable so that the moieties remain physically associated under the conditions in which the structure is used, e.g., physiological conditions. An “association” need not be strictly through direct covalent chemical bonding. It may also suggest ionic or hydrogen bonding or a hybridization based connectivity sufficiently stable such that the “associated” entities remain physically associated.

[0912] Auxotrophic: As used herein, the term “auxotrophic” refers to mRNA that comprises at least one feature that triggers or induces the degradation or inactivation of the mRNA such that the protein expression is substantially prevented or reduced in a selected tissue or organ.

[0913] Bifunctional: As used herein, the term “bifunctional” refers to any substance, molecule or moiety which is capable of or maintains at least two functions. The functions may effect the same outcome or a different outcome. The structure that produces the function may be the same or different. For example, bifunctional modified RNAs of the present invention may encode a cytotoxic peptide (a first function) while those nucleosides which comprise the encoding RNA are, in and of themselves, cytotoxic (second function). In this example, delivery of the bifunctional modified RNA to a cancer cell would produce not only a peptide or protein molecule which may ameliorate or treat the cancer but would also deliver a cytotoxic payload of nucleosides to the cell should degradation, instead of translation of the modified RNA, occur.

[0914] Biocompatible: As used herein, the term “biocompatible” means compatible with living cells, tissues, organs or systems posing little to no risk of injury, toxicity or rejection by the immune system.

[0915] Biodegradable: As used herein, the term “biodegradable” means capable of being broken down into innocuous products by the action of living things.

[0916] Biologically active: As used herein, the phrase “biologically active” refers to a characteristic of any substance that has activity in a biological system and/or organism. For instance, a substance that, when administered to an organism, has a biological affect on that organism, is considered to be biologically active. In particular embodiments, a nucleic acid molecule of the present invention may be considered biologically active if even a portion of the nucleic acid molecule is biologically active or mimics an activity considered biologically relevant.

[0917] Chemical terms: The following provides the definition of various chemical terms from “acyl” to “thiol.”

[0918] The term “acyl,” as used herein, represents a hydrogen or an alkyl group (e.g., a haloalkyl group), as defined herein, that is attached to the parent molecular group through a carbonyl group, as defined herein, and is exemplified by formyl (i.e., a carboxyaldehyde group), acetyl, propionyl, butanoyl and the like. Exemplary unsubstituted acyl groups include from 1 to 7, from 1 to 11, or from 1 to 21 carbons. In some embodiments, the alkyl group is further substituted with 1, 2, 3, or 4 substituents as described herein.

[0919] The term “acylamino,” as used herein, represents an acyl group, as defined herein, attached to the parent molecular group though an amino group, as defined herein (i.e., —N(R^{N1})—C(O)—R, where R is H or an optionally substituted C₁₋₆, C₁₋₁₀, or C₁₋₂₀ alkyl group and R^{N1} is as defined herein). Exemplary unsubstituted acylamino groups include from 1 to 41 carbons (e.g., from 1 to 7, from 1 to 13, from 1 to 21, from 2 to 7, from 2 to 13, from 2 to 21, or from 2 to 41 carbons). In some embodiments, the alkyl group is further substituted with 1, 2, 3, or 4 substituents as described herein, and/or the amino group is —NH₂ or —NHR^{N1}, wherein R^{N1} is, independently, OH, NO₂, NH₂, NR^{N2}₂, SO₂OR^{N2}, SO₂R^{N2}, SOR^{N2}, alkyl, or aryl, and each R^{N2} can be H, alkyl, or aryl.

[0920] The term “acyloxy,” as used herein, represents an acyl group, as defined herein, attached to the parent molecular group though an oxygen atom (i.e., —O—C(O)—R, where R is H or an optionally substituted C₁₋₆, C₁₋₁₀, or C₁₋₂₀ alkyl group). Exemplary unsubstituted acyloxy groups include from 1 to 21 carbons (e.g., from 1 to 7 or from 1 to 11 carbons). In some embodiments, the alkyl group is further substituted with 1, 2, 3, or 4 substituents as described herein, and/or the amino group is —NH₂ or —NHR^{N1}, wherein R^{N1} is, independently, OH, NO₂, NH₂, NR^{N2}₂, SO₂OR^{N2}, SO₂R^{N2}, SOR^{N2}, alkyl, or aryl, and each R^{N2} can be H, alkyl, or aryl.

[0921] The term “alkaryl,” as used herein, represents an aryl group, as defined herein, attached to the parent molecular group through an alkylene group, as defined herein. Exemplary unsubstituted alkaryl groups are from 7 to 30 carbons (e.g., from 7 to 16 or from 7 to 20 carbons, such as C₁₋₆ alk-C₆₋₁₀ aryl, C₁₋₁₀ alk-C₆₋₁₀ aryl, or C₁₋₂₀ alk-C₆₋₁₀ aryl). In some embodiments, the alkylene and the aryl each can be further substituted with 1, 2, 3, or 4 substituent groups as defined herein for the respective groups. Other groups preceded by the prefix “alk-” are defined in the same manner, where “alk” refers to a C₁₋₆ alkylene, unless otherwise noted, and the attached chemical structure is as defined herein.

[0922] The term “alkcycloalkyl” represents a cycloalkyl group, as defined herein, attached to the parent molecular group through an alkylene group, as defined herein (e.g., an alkylene group of from 1 to 4, from 1 to 6, from 1 to 10, or form 1 to 20 carbons). In some embodiments, the alkylene and the cycloalkyl each can be further substituted with 1, 2, 3, or 4 substituent groups as defined herein for the respective group.

[0923] The term “alkenyl,” as used herein, represents monovalent straight or branched chain groups of, unless otherwise specified, from 2 to 20 carbons (e.g., from 2 to 6 or from 2 to 10 carbons) containing one or more carbon-carbon double bonds and is exemplified by ethenyl, 1-propenyl, 2-propenyl, 2-methyl-1-propenyl, 1-butenyl, 2-butenyl, and the like. Alkenyls include both cis and trans isomers. Alkenyl groups may be optionally substituted with 1, 2, 3, or 4 substituent groups that are selected, independently, from amino, aryl, cycloalkyl, or heterocyclyl (e.g., heteroaryl), as defined herein, or any of the exemplary alkyl substituent groups described herein.

[0924] The term “alkenyloxy” represents a chemical substituent of formula —OR, where R is a C₂₋₂₀ alkenyl group (e.g., C₂₋₆ or C₂₋₁₀ alkenyl), unless otherwise specified. Exemplary alkenyloxy groups include ethenyloxy, propenyloxy, and the like. In some embodiments, the alkenyl group can be further substituted with 1, 2, 3, or 4 substituent groups as defined herein (e.g., a hydroxy group).

[0925] The term “alkheteroaryl” refers to a heteroaryl group, as defined herein, attached to the parent molecular group through an alkylene group, as defined herein. Exemplary unsubstituted alkheteroaryl groups are from 2 to 32 carbons (e.g., from 2 to 22, from 2 to 18, from 2 to 17, from 2 to 16, from 3 to 15, from 2 to 14, from 2 to 13, or from 2 to 12 carbons, such as C₁₋₆ alk-C₁₋₁₂ heteroaryl, C₁₋₁₀ alk-C₁₋₁₂ heteroaryl, or C₁₋₂₀ alk-C₁₋₁₂ heteroaryl). In some embodiments, the alkylene and the heteroaryl each can be further substituted with 1, 2, 3, or 4 substituent groups as defined herein for the respective group. Alkheteroaryl groups are a subset of alkheterocyclyl groups.

[0926] The term “alkheterocyclyl” represents a heterocyclyl group, as defined herein, attached to the parent molecular group through an alkylene group, as defined herein. Exemplary unsubstituted alkheterocyclyl groups are from 2 to 32 carbons (e.g., from 2 to 22, from 2 to 18, from 2 to 17, from 2 to 16, from 3 to 15, from 2 to 14, from 2 to 13, or from 2 to 12 carbons, such as C₁₋₆ alk-C₁₋₁₂ heterocyclyl, C₁₋₁₀ alk-C₁₋₁₂ heterocyclyl, or C₁₋₂₀ alk-C₁₋₁₂ heterocyclyl). In some embodiments, the alkylene and the heterocyclyl each can be further substituted with 1, 2, 3, or 4 substituent groups as defined herein for the respective group.

[0927] The term “alkoxy” represents a chemical substituent of formula —OR, where R is a C₁₋₂₀ alkyl group (e.g., C₁₋₆ or C₁₋₁₀ alkyl), unless otherwise specified. Exemplary alkoxy groups include methoxy, ethoxy, propoxy (e.g., n-propoxy and isopropoxy), t-butoxy, and the like. In some embodiments, the alkyl group can be further substituted with 1, 2, 3, or 4 substituent groups as defined herein (e.g., hydroxy or alkoxy).

[0928] The term “alkoxyalkoxy” represents an alkoxy group that is substituted with an alkoxy group. Exemplary unsubstituted alkoxyalkoxy groups include between 2 to 40 carbons (e.g., from 2 to 12 or from 2 to 20 carbons, such as C₁₋₆ alkoxy-C₁₋₆ alkoxy, C₁₋₁₀ alkoxy-C₁₋₁₀ alkoxy, or C₁₋₂₀ alkoxy-C₁₋₂₀ alkoxy). In some embodiments, the each alkoxy group can be further substituted with 1, 2, 3, or 4 substituent groups as defined herein.

[0929] The term “alkoxyalkyl” represents an alkyl group that is substituted with an alkoxy group. Exemplary unsubstituted alkoxyalkyl groups include between 2 to 40 carbons (e.g., from 2 to 12 or from 2 to 20 carbons, such as C₁₋₆ alkoxy-C₁₋₆ alkyl, C₁₋₁₀ alkoxy-C₁₋₁₀ alkyl, or C₁₋₂₀ alkoxy-C₁₋₂₀ alkyl). In some embodiments, the alkyl and the alkoxy each can be further substituted with 1, 2, 3, or 4 substituent groups as defined herein for the respective group.

[0930] The term “alkoxycarbonyl,” as used herein, represents an alkoxy, as defined herein, attached to the parent molecular group through a carbonyl atom (e.g., —C(O)—OR, where R is H or an optionally substituted C₁₋₆, C₁₋₁₀, or C₁₋₂₀ alkyl group). Exemplary unsubstituted alkoxycarbonyl include from 1 to 21 carbons (e.g., from 1 to 11 or from 1 to 7 carbons). In some embodiments, the alkoxy group is further substituted with 1, 2, 3, or 4 substituents as described herein.

[0931] The term “alkoxycarbonylalkoxy,” as used herein, represents an alkoxy group, as defined herein, that is substituted with an alkoxycarbonyl group, as defined herein (e.g., —O-alkyl-C(O)—OR, where R is an optionally substituted C₁₋₆, C₁₋₁₀, or C₁₋₂₀ alkyl group). Exemplary unsubstituted alkoxycarbonylalkoxy include from 3 to 41 carbons (e.g., from 3 to 10, from 3 to 13, from 3 to 17, from 3 to 21, or from 3 to 31 carbons, such as C₁₋₆ alkoxycarbonyl-C₁₋₆ alkoxy, C₁₋₁₀ alkoxycarbonyl-C₁₋₁₀ alkoxy, or C₁₋₂₀ alkoxycarbonyl-C₁₋₂₀ alkoxy). In some embodiments, each alkoxy group is further independently substituted with 1, 2, 3, or 4 substituents, as described herein (e.g., a hydroxy group).

[0932] The term “alkoxycarbonylalkyl,” as used herein, represents an alkyl group, as defined herein, that is substituted with an alkoxycarbonyl group, as defined herein (e.g., -alkyl-C(O)—OR, where R is an optionally substituted C₁₋₂₀, C₁₋₁₀, or C₁₋₆ alkyl group). Exemplary unsubstituted alkoxycarbonylalkyl include from 3 to 41 carbons (e.g., from 3 to 10, from 3 to 13, from 3 to 17, from 3 to 21, or from 3 to 31 carbons, such as C₁₋₆ alkoxycarbonyl-C₁₋₆ alkyl, C₁₋₁₀ alkoxycarbonyl-C₁₋₁₀ alkyl, or C₁₋₂₀ alkoxycarbonyl-C₁₋₂₀ alkyl). In some embodiments, each alkyl and alkoxy group is further independently substituted with 1, 2, 3, or 4 substituents as described herein (e.g., a hydroxy group).

[0933] The term “alkyl,” as used herein, is inclusive of both straight chain and branched chain saturated groups from 1 to 20 carbons (e.g., from 1 to 10 or from 1 to 6), unless otherwise specified. Alkyl groups are exemplified by methyl, ethyl, n- and iso-propyl, n-, sec-, iso- and tert-butyl, neopentyl, and the like, and may be optionally substituted with one, two, three, or, in the case of alkyl groups of two carbons or more, four substituents independently selected from the group consisting of: (1) C₁₋₆ alkoxy; (2) C₁₋₆ alkylsulfinyl; (3) amino, as defined herein (e.g., unsubstituted amino (i.e., —NH₂) or a substituted amino (i.e., —N(R^{N1})₂, where R^{N1} is as defined for amino); (4) C₆₋₁₀ aryl-C₁₋₆ alkoxy; (5) azido; (6) halo; (7) (C₂₋₉ heterocyclyl)oxy; (8) hydroxy; (9) nitro; (10) oxo (e.g., carboxyaldehyde or acyl); (11) C₁₋₇ spirocyclyl; (12) thioalkoxy; (13) thiol; (14) —CO₂R^{A′}, where R^{A′} is selected from the group consisting of (a) C₁₋₂₀ alkyl (e.g., C₁₋₆ alkyl), (b) C₂₋₂₀ alkenyl (e.g., C₂₋₆ alkenyl), (c) C₆₋₁₀ aryl, (d) hydrogen, (e) C₁₋₆ alk-C₆₋₁₀ aryl, (f) amino-C₁₋₂₀ alkyl, (g) polyethylene glycol of —(CH₂)ₛ₂(OCH₂CH₂)ₛ₁(CH₂)ₛ₃OR′, wherein s1 is an integer from 1 to 10 (e.g., from 1 to 6 or from 1 to 4), each of s2 and s3, independently, is an integer from 0 to 10 (e.g., from 0 to 4, from 0 to 6, from 1 to 4, from 1 to 6, or from 1 to 10), and R′ is H or C₁₋₂₀ alkyl, and (h) amino-polyethylene glycol of —NR^{N1}(CH₂)ₛ₂(CH₂CH₂O)ₛ₁(CH₂)ₛ₃NR^{N1}, wherein s1 is an integer from 1 to 10 (e.g., from 1 to 6 or from 1 to 4), each of s2 and s3, independently, is an integer from 0 to 10 (e.g., from 0 to 4, from 0 to 6, from 1 to 4, from 1 to 6, or from 1 to 10), and each R^{N1} is, independently, hydrogen or optionally substituted C₁₋₆ alkyl; (15) —C(O)NR^{B′}R^{C′}, where each of R^{B′} and R^{C′} is, independently, selected from the group consisting of (a) hydrogen, (b) C₁₋₆ alkyl, (c) C₆₋₁₀ aryl, and (d) C₁₋₆ alk-C₆₋₁₀ aryl; (16) —SO₂R^{D′}, where R^{D′} is selected from the group consisting of (a) C₁₋₆ alkyl, (b) C₆₋₁₀ aryl, (c) C₁₋₆ alk-C₆₋₁₀ aryl, and (d) hydroxy; (17) —SO₂NR^{E′}R^{F′}, where each of R^{E′} and R^{F′} is, independently, selected from the group consisting of (a) hydrogen, (b) C₁₋₆ alkyl, (c) C₆₋₁₀ aryl and (d) C₁₋₆ alk-C₆₋₁₀ aryl; (18) —C(O)R^{G′}, where R^{G′} is selected from the group consisting of (a) C₁₋₂₀ alkyl (e.g., C₁₋₆ alkyl), (b) C₂₋₂₀ alkenyl (e.g., C₂₋₆ alkenyl), (c) C₆₋₁₀ aryl, (d) hydrogen, (e) C₁₋₆ alk-C₆₋₁₀ aryl, (f) amino-C₁₋₂₀ alkyl, (g) polyethylene glycol of —(CH₂)ₛ₂(OCH₂CH₂)ₛ₁(CH₂)ₛ₃OR′, wherein s1 is an integer from 1 to 10 (e.g., from 1 to 6 or from 1 to 4), each of s2 and s3, independently, is an integer from 0 to 10 (e.g., from 0 to 4, from 0 to 6, from 1 to 4, from 1 to 6, or from 1 to 10), and R′ is H or C₁₋₂₀ alkyl, and (h) amino-polyethylene glycol of —NR^{N1}(CH₂)ₛ₂(CH₂CH₂O)ₛ₁(CH₂)ₛ₃NR^{N1}, wherein s1 is an integer from 1 to 10 (e.g., from 1 to 6 or from 1 to 4), each of s2 and s3, independently, is an integer from 0 to 10 (e.g., from 0 to 4, from 0 to 6, from 1 to 4, from 1 to 6, or from 1 to 10), and each R^{N1} is, independently, hydrogen or optionally substituted C₁₋₆ alkyl; (19) —NR^{H′}C(O)R^{I′}, wherein R^{H′} is selected from the group consisting of (a1) hydrogen and (b1) C₁₋₆ alkyl, and R^{I′} is selected from the group consisting of (a2) C₁₋₂₀ alkyl (e.g., C₁₋₆ alkyl), (b2) C₂₋₂₀ alkenyl (e.g., C₂₋₆ alkenyl), (c2) C₆₋₁₀ aryl, (d2) hydrogen, (e2) C₁₋₆ alk-C₆₋₁₀ aryl, (f2) amino-C₁₋₂₀ alkyl, (g2) polyethylene glycol of —(CH₂)ₛ₂(OCH₂CH₂)ₛ₁(CH₂)ₛ₃OR′, wherein s1 is an integer from 1 to 10 (e.g., from 1 to 6 or from 1 to 4), each of s2 and s3, independently, is an integer from 0 to 10 (e.g., from 0 to 4, from 0 to 6, from 1 to 4, from 1 to 6, or from 1 to 10), and R′ is H or C₁₋₂₀ alkyl, and (h2) amino-polyethylene glycol of —NR^{N1}(CH₂)ₛ₂(CH₂CH₂O)ₛ₁(CH₂)ₛ₃NR^{N1}, wherein s1 is an integer from 1 to 10 (e.g., from 1 to 6 or from 1 to 4), each of s2 and s3, independently, is an integer from 0 to 10 (e.g., from 0 to 4, from 0 to 6, from 1 to 4, from 1 to 6, or from 1 to 10), and each R^{N1} is, independently, hydrogen or optionally substituted C₁₋₆ alkyl; (20) —NR^{J′}C(O)OR^{K′}, wherein R^{J′} is selected from the group consisting of (a1) hydrogen and (b1) C₁₋₆ alkyl, and R^{K′} is selected from the group consisting of (a2) C₁₋₂₀ alkyl (e.g., C₁₋₆ alkyl), (b2) C₂₋₂₀ alkenyl (e.g., C₂₋₆ alkenyl), (c2) C₆₋₁₀ aryl, (d2) hydrogen, (e2) C₁₋₆ alk-C₆₋₁₀ aryl, (f2) amino-C₁₋₂₀ alkyl, (g2) polyethylene glycol of —(CH₂)ₛ₂(OCH₂CH₂)ₛ₁(CH₂)ₛ₃OR′, wherein s1 is an integer from 1 to 10 (e.g., from 1 to 6 or from 1 to 4), each of s2 and s3, independently, is an integer from 0 to 10 (e.g., from 0 to 4, from 0 to 6, from 1 to 4, from 1 to 6, or from 1 to 10), and R′ is H or C₁₋₂₀ alkyl, and (h2) amino-polyethylene glycol of —NR^{N1}(CH₂)ₛ₂(CH₂CH₂O)ₛ₁(CH₂)ₛ₃NR^{N1}, wherein s1 is an integer from 1 to 10 (e.g., from 1 to 6 or from 1 to 4), each of s2 and s3, independently, is an integer from 0 to 10 (e.g., from 0 to 4, from 0 to 6, from 1 to 4, from 1 to 6, or from 1 to 10), and each R^{N1} is, independently, hydrogen or optionally substituted C₁₋₆ alkyl; and (21) amidine. In some embodiments, each of these groups can be further substituted as described herein. For example, the alkylene group of a C₁-alkaryl can be further substituted with an oxo group to afford the respective aryloyl substituent.

[0934] The term “alkylene” and the prefix “alk-,” as used herein, represent a saturated divalent hydrocarbon group derived from a straight or branched chain saturated hydrocarbon by the removal of two hydrogen atoms, and is exemplified by methylene, ethylene, isopropylene, and the like. The term “C_{x-y} alkylene” and the prefix “C_{x-y} alk-” represent alkylene groups having between x and y carbons. Exemplary values for x are 1, 2, 3, 4, 5, and 6, and exemplary values for y are 2, 3, 4, 5, 6, 7, 8, 9, 10, 12, 14, 16, 18, or 20 (e.g., C₁₋₆, C₁₋₁₀, C₂₋₂₀, C₂₋₆, C₂₋₁₀, or C₂₋₂₀ alkylene). In some embodiments, the alkylene can be further substituted with 1, 2, 3, or 4 substituent groups as defined herein for an alkyl group.

[0935] The term “alkylsulfinyl,” as used herein, represents an alkyl group attached to the parent molecular group through an —S(O)— group. Exemplary unsubstituted alkylsulfinyl groups are from 1 to 6, from 1 to 10, or from 1 to 20 carbons. In some embodiments, the alkyl group can be further substituted with 1, 2, 3, or 4 substituent groups as defined herein.

[0936] The term “alkylsulfinylalkyl,” as used herein, represents an alkyl group, as defined herein, substituted by an alkylsulfinyl group. Exemplary unsubstituted alkylsulfinylalkyl groups are from 2 to 12, from 2 to 20, or from 2 to 40 carbons. In some embodiments, each alkyl group can be further substituted with 1, 2, 3, or 4 substituent groups as defined herein.

[0937] The term “alkynyl,” as used herein, represents monovalent straight or branched chain groups from 2 to 20 carbon atoms (e.g., from 2 to 4, from 2 to 6, or from 2 to 10 carbons) containing a carbon-carbon triple bond and is exemplified by ethynyl, 1-propynyl, and the like. Alkynyl groups may be optionally substituted with 1, 2, 3, or 4 substituent groups that are selected, independently, from aryl, cycloalkyl, or heterocyclyl (e.g., heteroaryl), as defined herein, or any of the exemplary alkyl substituent groups described herein.

[0938] The term “alkynyloxy” represents a chemical substituent of formula —OR, where R is a C₂₋₂₀ alkynyl group (e.g., C₂₋₆ or C₂₋₁₀ alkynyl), unless otherwise specified. Exemplary alkynyloxy groups include ethynyloxy, propynyloxy, and the like. In some embodiments, the alkynyl group can be further substituted with 1, 2, 3, or 4 substituent groups as defined herein (e.g., a hydroxy group).

[0939] The term “amidine,” as used herein, represents a —C(═NH)NH₂ group.

[0940] The term “amino,” as used herein, represents —N(R^{N1})₂, wherein each R^{N1} is, independently, H, OH, NO₂, N(R^{N2})₂, SO₂OR^{N2}, SO₂R^{N2}, SOR^{N2}, an N-protecting group, alkyl, alkenyl, alkynyl, alkoxy, aryl, alkaryl, cycloalkyl, alkcycloalkyl, carboxyalkyl, sulfoalkyl, heterocyclyl (e.g., heteroaryl), or alkheterocyclyl (e.g., alkheteroaryl), wherein each of these recited R^{N1} groups can be optionally substituted, as defined herein for each group; or two R^{N1} combine to form a heterocyclyl or an N-protecting group, and wherein each R^{N2} is, independently, H, alkyl, or aryl. The amino groups of the invention can be an unsubstituted amino (i.e., —NH₂) or a substituted amino (i.e., —N(R^{N1})₂). In a preferred embodiment, amino is —NH₂ or —NHR^{N1}₅ wherein R^{N1} is, independently, OH, NO₂, NH₂, NR^{N2}₂, SO₂OR^{N2}, SO₂R^{N2}, SOR^{N2}, alkyl, carboxyalkyl, sulfoalkyl, or aryl, and each R^{N2} can be H, C₁₋₂₀ alkyl (e.g., C₁₋₆ alkyl), or C₆₋₁₀ aryl.

[0941] The term “amino acid,” as described herein, refers to a molecule having a side chain, an amino group, and an acid group (e.g., a carboxy group of —CO₂H or a sulfo group of —SO₃H), wherein the amino acid is attached to the parent molecular group by the side chain, amino group, or acid group (e.g., the side chain). In some embodiments, the amino acid is attached to the parent molecular group by a carbonyl group, where the side chain or amino group is attached to the carbonyl group. Exemplary side chains include an optionally substituted alkyl, aryl, heterocyclyl, alkaryl, alkheterocyclyl, aminoalkyl, carbamoylalkyl, and carboxyalkyl. Exemplary amino acids include alanine, arginine, asparagine, aspartic acid, cysteine, glutamic acid, glutamine, glycine, histidine, hydroxynorvaline, isoleucine, leucine, lysine, methionine, norvaline, ornithine, phenylalanine, proline, pyrrolysine, selenocysteine, serine, taurine, threonine, tryptophan, tyrosine, and valine. Amino acid groups may be optionally substituted with one, two, three, or, in the case of amino acid groups of two carbons or more, four substituents independently selected from the group consisting of: (1) C₁₋₆ alkoxy; (2) C₁₋₆ alkylsulfinyl; (3) amino, as defined herein (e.g., unsubstituted amino (i.e., —NH₂) or a substituted amino (i.e., —N(R^{N1})₂, where R^{N1} is as defined for amino); (4) C₆₋₁₀ aryl-C₁₋₆ alkoxy; (5) azido; (6) halo; (7) (C₂₋₉ heterocyclyl)oxy; (8) hydroxy; (9) nitro; (10) oxo (e.g., carboxyaldehyde or acyl); (11) C₁₋₇ spirocyclyl; (12) thioalkoxy; (13) thiol; (14) —CO₂R^{A′}, where R^{A′} is selected from the group consisting of (a) C₁₋₂₀ alkyl (e.g., C₁₋₆ alkyl), (b) C₂₋₂₀ alkenyl (e.g., C₂₋₆ alkenyl), (c) C₆₋₁₀ aryl, (d) hydrogen, (e) C₁₋₆ alk-C₆₋₁₀ aryl, (f) amino-C₁₋₂₀ alkyl, (g) polyethylene glycol of —(CH₂)ₛ₂(OCH₂CH₂)ₛ₁(CH₂)ₛ₃OR′, wherein s1 is an integer from 1 to 10 (e.g., from 1 to 6 or from 1 to 4), each of s2 and s3, independently, is an integer from 0 to 10 (e.g., from 0 to 4, from 0 to 6, from 1 to 4, from 1 to 6, or from 1 to 10), and R′ is H or C₁₋₂₀ alkyl, and (h) amino-polyethylene glycol of —NR^{N1}(CH₂)ₛ₂(CH₂CH₂O)ₛ₁(CH₂)ₛ₃NR^{N1}, wherein s1 is an integer from 1 to 10 (e.g., from 1 to 6 or from 1 to 4), each of s2 and s3, independently, is an integer from 0 to 10 (e.g., from 0 to 4, from 0 to 6, from 1 to 4, from 1 to 6, or from 1 to 10), and each R^{N1} is, independently, hydrogen or optionally substituted C₁₋₆ alkyl; (15) —C(O)NR^{B′}R^{C′}, where each of R^{B′} and R^{C′} is, independently, selected from the group consisting of (a) hydrogen, (b) C₁₋₆ alkyl, (c) C₆₋₁₀ aryl, and (d) C₁₋₆ alk-C₆₋₁₀ aryl; (16) —SO₂R^{D′}, where R^{D′} is selected from the group consisting of (a) C₁₋₆ alkyl, (b) C₆₋₁₀ aryl, (c) C₁₋₆ alk-C₆₋₁₀ aryl, and (d) hydroxy; (17) —SO₂NR^{E′}R^{F′}, where each of R^{E′} and R^{F′} is, independently, selected from the group consisting of (a) hydrogen, (b) C₁₋₆ alkyl, (c) C₆₋₁₀ aryl and (d) C₁₋₆ alk-C₆₋₁₀ aryl; (18) —C(O)R^{G′}, where R^{G′} is selected from the group consisting of (a) C₁₋₂₀ alkyl (e.g., C₁₋₆ alkyl), (b) C₂₋₂₀ alkenyl (e.g., C₂₋₆ alkenyl), (c) C₆₋₁₀ aryl, (d) hydrogen, (e) C₁₋₆ alk-C₆₋₁₀ aryl, (f) amino-C₁₋₂₀ alkyl, (g) polyethylene glycol of —(CH₂)ₛ₂(OCH₂CH₂)ₛ₁(CH₂)ₛ₃OR′, wherein s1 is an integer from 1 to 10 (e.g., from 1 to 6 or from 1 to 4), each of s2 and s3, independently, is an integer from 0 to 10 (e.g., from 0 to 4, from 0 to 6, from 1 to 4, from 1 to 6, or from 1 to 10), and R′ is H or C₁₋₂₀ alkyl, and (h) amino-polyethylene glycol of —NR^{N1}(CH₂)ₛ₂(CH₂CH₂O)ₛ₁(CH₂)ₛ₃NR^{N1}, wherein s1 is an integer from 1 to 10 (e.g., from 1 to 6 or from 1 to 4), each of s2 and s3, independently, is an integer from 0 to 10 (e.g., from 0 to 4, from 0 to 6, from 1 to 4, from 1 to 6, or from 1 to 10), and each R^{N1} is, independently, hydrogen or optionally substituted C₁₋₆ alkyl; (19) —NR^{H′}C(O)R^{I′}, wherein R^{H′} is selected from the group consisting of (a1) hydrogen and (b1) C₁₋₆ alkyl, and R^{I′} is selected from the group consisting of (a2) C₁₋₂₀ alkyl (e.g., C₁₋₆ alkyl), (b2) C₂₋₂₀ alkenyl (e.g., C₂₋₆ alkenyl), (c2) C₆₋₁₀ aryl, (d2) hydrogen, (e2) C₁₋₆ alk-C₆₋₁₀ aryl, (f2) amino-C₁₋₂₀ alkyl, (g2) polyethylene glycol of —(CH₂)ₛ₂(OCH₂CH₂)ₛ₁(CH₂)ₛ₃OR′, wherein s1 is an integer from 1 to 10 (e.g., from 1 to 6 or from 1 to 4), each of s2 and s3, independently, is an integer from 0 to 10 (e.g., from 0 to 4, from 0 to 6, from 1 to 4, from 1 to 6, or from 1 to 10), and R′ is H or C₁₋₂₀ alkyl, and (h2) amino-polyethylene glycol of —NR^{N1}(CH₂)ₛ₂(CH₂CH₂O)ₛ₁(CH₂)ₛ₃NR^{N1}, wherein s1 is an integer from 1 to 10 (e.g., from 1 to 6 or from 1 to 4), each of s2 and s3, independently, is an integer from 0 to 10 (e.g., from 0 to 4, from 0 to 6, from 1 to 4, from 1 to 6, or from 1 to 10), and each R^{N1} is, independently, hydrogen or optionally substituted C₁₋₆ alkyl; (20) —NR^{J′}C(O)OR^{K′}, wherein R^{J′} is selected from the group consisting of (a1) hydrogen and (b1) C₁₋₆ alkyl, and R^{K′} is selected from the group consisting of (a2) C₁₋₂₀ alkyl (e.g., C₁₋₆ alkyl), (b2) C₂₋₂₀ alkenyl (e.g., C₂₋₆ alkenyl), (c2) C₆₋₁₀ aryl, (d2) hydrogen, (e2) C₁₋₆ alk-C₆₋₁₀ aryl, (f2) amino-C₁₋₂₀ alkyl, (g2) polyethylene glycol of —(CH₂)ₛ₂(OCH₂CH₂)ₛ₁(CH₂)ₛ₃OR′, wherein s1 is an integer from 1 to 10 (e.g., from 1 to 6 or from 1 to 4), each of s2 and s3, independently, is an integer from 0 to 10 (e.g., from 0 to 4, from 0 to 6, from 1 to 4, from 1 to 6, or from 1 to 10), and R′ is H or C₁₋₂₀ alkyl, and (h2) amino-polyethylene glycol of —NR^{N1}(CH₂)ₛ₂(CH₂CH₂O)ₛ₁(CH₂)ₛ₃NR^{N1}, wherein s1 is an integer from 1 to 10 (e.g., from 1 to 6 or from 1 to 4), each of s2 and s3, independently, is an integer from 0 to 10 (e.g., from 0 to 4, from 0 to 6, from 1 to 4, from 1 to 6, or from 1 to 10), and each R^{N1} is, independently, hydrogen or optionally substituted C₁₋₆ alkyl; and (21) amidine. In some embodiments, each of these groups can be further substituted as described herein.

[0942] The term “aminoalkoxy,” as used herein, represents an alkoxy group, as defined herein, substituted by an amino group, as defined herein. The alkyl and amino each can be further substituted with 1, 2, 3, or 4 substituent groups as described herein for the respective group (e.g., CO₂R^{A′}, where R^{A′} is selected from the group consisting of (a) C₁₋₆ alkyl, (b) C₆₋₁₀ aryl, (c) hydrogen, and (d) C₁₋₆ alk-C₆₋₁₀ aryl, e.g., carboxy).

[0943] The term “aminoalkyl,” as used herein, represents an alkyl group, as defined herein, substituted by an amino group, as defined herein. The alkyl and amino each can be further substituted with 1, 2, 3, or 4 substituent groups as described herein for the respective group (e.g., CO₂R^{A′}, where R^{A′} is selected from the group consisting of (a) C₁₋₆ alkyl, (b) C₆₋₁₀ aryl, (c) hydrogen, and (d) C₁₋₆ alk-C₆₋₁₀ aryl, e.g., carboxy).

[0944] The term “aryl,” as used herein, represents a mono-, bicyclic, or multicyclic carbocyclic ring system having one or two aromatic rings and is exemplified by phenyl, naphthyl, 1,2-dihydronaphthyl, 1,2,3,4-tetrahydronaphthyl, anthracenyl, phenanthrenyl, fluorenyl, indanyl, indenyl, and the like, and may be optionally substituted with 1, 2, 3, 4, or 5 substituents independently selected from the group consisting of: (1) C₁₋₇ acyl (e.g., carboxyaldehyde); (2) C₁₋₂₀ alkyl (e.g., C₁₋₆ alkyl, C₁₋₆ alkoxy-C₁₋₆ alkyl, C₁₋₆ alkylsulfinyl-C₁₋₆ alkyl, amino-C₁₋₆ alkyl, azido-C₁₋₆ alkyl, (carboxyaldehyde)-C₁₋₆ alkyl, halo-C₁₋₆ alkyl (e.g., perfluoroalkyl), hydroxy-C₁₋₆ alkyl, nitro-C₁₋₆ alkyl, or C₁₋₆ thioalkoxy-C₁₋₆ alkyl); (3) C₁₋₂₀ alkoxy (e.g., C₁₋₆ alkoxy, such as perfluoroalkoxy); (4) C₁₋₆ alkylsulfinyl; (5) C₆₋₁₀ aryl; (6) amino; (7) C₁₋₆ alk-C₆₋₁₀ aryl; (8) azido; (9) C₃₋₈ cycloalkyl; (10) C₁₋₆ alk-C₃₋₈ cycloalkyl; (11) halo; (12) C₁₋₁₂ heterocyclyl (e.g., C₁₋₁₂ heteroaryl); (13) (C₁₋₁₂ heterocyclyl)oxy; (14) hydroxy; (15) nitro; (16) C₁₋₂₀ thioalkoxy (e.g., C₁₋₆ thioalkoxy); (17) —(CH₂)—CO₂R^{A′}, where q is an integer from zero to four, and R^{A′} is selected from the group consisting of (a) C₁₋₆ alkyl, (b) C₆₋₁₀ aryl, (c) hydrogen, and (d) C₁₋₆ alk-C₆₋₁₀ aryl; (18) —(CH₂)_{q}CONR^{B′}R^{C′}, where q is an integer from zero to four and where R^{B′} and R^{C′} are independently selected from the group consisting of (a) hydrogen, (b) C₁₋₆ alkyl, (c) C₆₋₁₀ aryl, and (d) C₁₋₆ alk-C₆₋₁₀ aryl; (19) —(CH₂)—SO₂R^{D′}, where q is an integer from zero to four and where R^{D′} is selected from the group consisting of (a) alkyl, (b) C₆₋₁₀ aryl, and (c) alk-C₆₋₁₀ aryl; (20) —(CH₂)—SO₂NR^{E′}R^{F′}, where q is an integer from zero to four and where each of R^{E′} and R^{F′} is, independently, selected from the group consisting of (a) hydrogen, (b) C₁₋₆ alkyl, (c) C₆₋₁₀ aryl, and (d) C₁₋₆ alk-C₆₋₁₀ aryl; (21) thiol; (22) C₆₋₁₀ aryloxy; (23) C₃₋₈ cycloalkoxy; (24) C₆₋₁₀ aryl-C₁-6 alkoxy; (25) C₁₋₆ alk-C₁₋₁₂ heterocyclyl (e.g., C₁₋₆ alk-C₁₋₁₂ heteroaryl); (26) C₂₋₂₀ alkenyl; and (27) C₂₋₂₀ alkynyl. In some embodiments, each of these groups can be further substituted as described herein. For example, the alkylene group of a C₁-alkaryl or a C₁-alkheterocyclyl can be further substituted with an oxo group to afford the respective aryloyl and (heterocyclyl)oyl substituent group.

[0945] The term “arylalkoxy,” as used herein, represents an alkaryl group, as defined herein, attached to the parent molecular group through an oxygen atom. Exemplary unsubstituted alkoxyalkyl groups include from 7 to 30 carbons (e.g., from 7 to 16 or from 7 to 20 carbons, such as C₆₋₁₀ aryl-C₁₋₆ alkoxy, C₆₋₁₀ aryl-C₁₋₁₀ alkoxy, or C₆₋₁₀ aryl-C₁₋₂₀ alkoxy). In some embodiments, the arylalkoxy group can be substituted with 1, 2, 3, or 4 substituents as defined herein

[0946] The term “aryloxy” represents a chemical substituent of formula —OR′, where R′ is an aryl group of 6 to 18 carbons, unless otherwise specified. In some embodiments, the aryl group can be substituted with 1, 2, 3, or 4 substituents as defined herein.

[0947] The term “aryloyl,” as used herein, represents an aryl group, as defined herein, that is attached to the parent molecular group through a carbonyl group. Exemplary unsubstituted aryloyl groups are of 7 to 11 carbons. In some embodiments, the aryl group can be substituted with 1, 2, 3, or 4 substituents as defined herein.

[0948] The term “azido” represents an —N₃ group, which can also be represented as —N═N═N.

[0949] The term “bicyclic,” as used herein, refer to a structure having two rings, which may be aromatic or non-aromatic. Bicyclic structures include spirocyclyl groups, as defined herein, and two rings that share one or more bridges, where such bridges can include one atom or a chain including two, three, or more atoms. Exemplary bicyclic groups include a bicyclic carbocyclyl group, where the first and second rings are carbocyclyl groups, as defined herein; a bicyclic aryl groups, where the first and second rings are aryl groups, as defined herein; bicyclic heterocyclyl groups, where the first ring is a heterocyclyl group and the second ring is a carbocyclyl (e.g., aryl) or heterocyclyl (e.g., heteroaryl) group; and bicyclic heteroaryl groups, where the first ring is a heteroaryl group and the second ring is a carbocyclyl (e.g., aryl) or heterocyclyl (e.g., heteroaryl) group. In some embodiments, the bicyclic group can be substituted with 1, 2, 3, or 4 substituents as defined herein for cycloalkyl, heterocyclyl, and aryl groups.

[0950] The terms “carbocyclic” and “carbocyclyl,” as used herein, refer to an optionally substituted C₃₋₁₂ monocyclic, bicyclic, or tricyclic structure in which the rings, which may be aromatic or non-aromatic, are formed by carbon atoms. Carbocyclic structures include cycloalkyl, cycloalkenyl, and aryl groups.

[0951] The term “carbamoyl,” as used herein, represents —C(O)—N(R^{N1})₂, where the meaning of each R^{N1} is found in the definition of “amino” provided herein.

[0952] The term “carbamoylalkyl,” as used herein, represents an alkyl group, as defined herein, substituted by a carbamoyl group, as defined herein. The alkyl group can be further substituted with 1, 2, 3, or 4 substituent groups as described herein.

[0953] The term “carbamyl,” as used herein, refers to a carbamate group having the structure

—NR^{N1}C(═O)OR or —OC(═O)N(R^{N1})₂, where the meaning of each R^{N1} is found in the definition of “amino” provided herein, and R is alkyl, cycloalkyl, alkcycloalkyl, aryl, alkaryl, heterocyclyl (e.g., heteroaryl), or alkheterocyclyl (e.g., alkheteroaryl), as defined herein.

[0954] The term “carbonyl,” as used herein, represents a C(O) group, which can also be represented as C═O.

[0955] The term “carboxyaldehyde” represents an acyl group having the structure —CHO.

[0956] The term “carboxy,” as used herein, means —CO₂H.

[0957] The term “carboxyalkoxy,” as used herein, represents an alkoxy group, as defined herein, substituted by a carboxy group, as defined herein. The alkoxy group can be further substituted with 1, 2, 3, or 4 substituent groups as described herein for the alkyl group.

[0958] The term “carboxyalkyl,” as used herein, represents an alkyl group, as defined herein, substituted by a carboxy group, as defined herein. The alkyl group can be further substituted with 1, 2, 3, or 4 substituent groups as described herein.

[0959] The term “cyano,” as used herein, represents an —CN group.

[0960] The term “cycloalkoxy” represents a chemical substituent of formula —OR, where R is a C₃₋₈ cycloalkyl group, as defined herein, unless otherwise specified. The cycloalkyl group can be further substituted with 1, 2, 3, or 4 substituent groups as described herein. Exemplary unsubstituted cycloalkoxy groups are from 3 to 8 carbons. In some embodiment, the cycloalkyl group can be further substituted with 1, 2, 3, or 4 substituent groups as described herein.

[0961] The term “cycloalkyl,” as used herein represents a monovalent saturated or unsaturated non-aromatic cyclic hydrocarbon group from three to eight carbons, unless otherwise specified, and is exemplified by cyclopropyl, cyclobutyl, cyclopentyl, cyclohexyl, cycloheptyl, bicyclo[2.2.1]heptyl, and the like. When the cycloalkyl group includes one carbon-carbon double bond, the cycloalkyl group can be referred to as a “cycloalkenyl” group. Exemplary cycloalkenyl groups include cyclopentenyl, cyclohexenyl, and the like. The cycloalkyl groups of this invention can be optionally substituted with: (1) C₁₋₇ acyl (e.g., carboxyaldehyde); (2) C₁₋₂₀ alkyl (e.g., C₁₋₆ alkyl, C₁-6 alkoxy-C₁₋₆ alkyl, C₁₋₆ alkylsulfinyl-C₁₋₆ alkyl, amino-C₁₋₆ alkyl, azido-C₁₋₆ alkyl, (carboxyaldehyde)-C₁₋₆ alkyl, halo-C₁₋₆ alkyl (e.g., perfluoroalkyl), hydroxy-C₁₋₆ alkyl, nitro-C₁₋₆ alkyl, or C₁₋₆ thioalkoxy-C₁₋₆ alkyl); (3) C₁₋₂₀ alkoxy (e.g., C₁₋₆ alkoxy, such as perfluoroalkoxy); (4) C₁₋₆ alkylsulfinyl; (5) C₆₋₁₀ aryl; (6) amino; (7) C₁₋₆ alk-C₆₋₁₀ aryl; (8) azido; (9) C₃₋₈ cycloalkyl; (10) C₁₋₆ alk-C₃₋₈ cycloalkyl; (11) halo; (12) C₁₋₁₂ heterocyclyl (e.g., C₁₋₁₂ heteroaryl); (13) (C₁₋₁₂ heterocyclyl)oxy; (14) hydroxy; (15) nitro; (16) C₁₋₂₀ thioalkoxy (e.g., C₁₋₆ thioalkoxy); (17) —(CH₂)_{q}CO₂R^{A′}, where q is an integer from zero to four, and R^{A′} is selected from the group consisting of (a) C₁₋₆ alkyl, (b) C₆₋₁₀ aryl, (c) hydrogen, and (d) C₁₋₆ alk-C₆₋₁₀ aryl; (18) —(CH₂)_{q}CONR^{B′}R^{C′}, where q is an integer from zero to four and where R^{B′} and R^{C′} are independently selected from the group consisting of (a) hydrogen, (b) C₆₋₁₀ alkyl, (c) C₆₋₁₀ aryl, and (d) C₁₋₆ alk-C₆₋₁₀ aryl; (19) —(CH₂)_{q}SO₂R^{D′}, where q is an integer from zero to four and where R^{D′} is selected from the group consisting of (a) C₆₋₁₀ alkyl, (b) C₆₋₁₀ aryl, and (c) C₁₋₆ alk-C₆₋₁₀ aryl; (20) —(CH₂)_{q}SO₂NR^{E′}R^{F′}, where q is an integer from zero to four and where each of R^{E′} and R^{F″} is, independently, selected from the group consisting of (a) hydrogen, (b) C₆₋₁₀ alkyl, (c) C₆₋₁₀ aryl, and (d) C₁₋₆ alk-C₆₋₁₀ aryl; (21) thiol; (22) C₆₋₁₀ aryloxy; (23) C₃₋₈ cycloalkoxy; (24) C₆₋₁₀ aryl-C₁₋₆ alkoxy; (25) C₁₋₆ alk-C₁₋₁₂ heterocyclyl (e.g., C₁₋₆ alk-C₁₋₁₂ heteroaryl); (26) oxo; (27) C₂₋₂₀ alkenyl; and (28) C₂₋₂₀ alkynyl. In some embodiments, each of these groups can be further substituted as described herein. For example, the alkylene group of a C₁-alkaryl or a C₁-alkheterocyclyl can be further substituted with an oxo group to afford the respective aryloyl and (heterocyclyl)oyl substituent group.

[0962] The term “diastereomer,” as used herein means stereoisomers that are not mirror images of one another and are non-superimposable on one another.

[0963] The term “effective amount” of an agent, as used herein, is that amount sufficient to effect beneficial or desired results, for example, clinical results, and, as such, an “effective amount” depends upon the context in which it is being applied. For example, in the context of administering an agent that treats cancer, an effective amount of an agent is, for example, an amount sufficient to achieve treatment, as defined herein, of cancer, as compared to the response obtained without administration of the agent.

[0964] The term “enantiomer,” as used herein, means each individual optically active form of a compound of the invention, having an optical purity or enantiomeric excess (as determined by methods standard in the art) of at least 80% (i.e., at least 90% of one enantiomer and at most 10% of the other enantiomer), preferably at least 90% and more preferably at least 98%.

[0965] The term “halo,” as used herein, represents a halogen selected from bromine, chlorine, iodine, or fluorine.

[0966] The term “haloalkoxy,” as used herein, represents an alkoxy group, as defined herein, substituted by a halogen group (i.e., F, Cl, Br, or I). A haloalkoxy may be substituted with one, two, three, or, in the case of alkyl groups of two carbons or more, four halogens. Haloalkoxy groups include perfluoroalkoxys (e.g., —OCF₃), —OCHF₂, —OCH₂F, —OCCl₃, —OCH₂CH₂Br, —OCH₂CH(CH₂CH₂Br)CH₃, and —OCHICH₃. In some embodiments, the haloalkoxy group can be further substituted with 1, 2, 3, or 4 substituent groups as described herein for alkyl groups.

[0967] The term “haloalkyl,” as used herein, represents an alkyl group, as defined herein, substituted by a halogen group (i.e., F, Cl, Br, or I). A haloalkyl may be substituted with one, two, three, or, in the case of alkyl groups of two carbons or more, four halogens. Haloalkyl groups include perfluoroalkyls (e.g., —CF₃), —CHF₂, —CH₂F, —CCl₃, —CH₂CH₂Br, —CH₂CH(CH₂CH₂Br)CH₃, and —CHICH₃. In some embodiments, the haloalkyl group can be further substituted with 1, 2, 3, or 4 substituent groups as described herein for alkyl groups.

[0968] The term “heteroalkylene,” as used herein, refers to an alkylene group, as defined herein, in which one or two of the constituent carbon atoms have each been replaced by nitrogen, oxygen, or sulfur. In some embodiments, the heteroalkylene group can be further substituted with 1, 2, 3, or 4 substituent groups as described herein for alkylene groups.

[0969] The term “heteroaryl,” as used herein, represents that subset of heterocyclyls, as defined herein, which are aromatic: i.e., they contain 4n+2 pi electrons within the mono- or multicyclic ring system. Exemplary unsubstituted heteroaryl groups are of 1 to 12 (e.g., 1 to 11, 1 to 10, 1 to 9, 2 to 12, 2 to 11, 2 to 10, or 2 to 9) carbons. In some embodiment, the heteroaryl is substituted with 1, 2, 3, or 4 substituents groups as defined for a heterocyclyl group.

[0970] The term “heterocyclyl,” as used herein represents a 5-, 6- or 7-membered ring, unless otherwise specified, containing one, two, three, or four heteroatoms independently selected from the group consisting of nitrogen, oxygen, and sulfur. The 5-membered ring has zero to two double bonds, and the 6- and 7-membered rings have zero to three double bonds. Exemplary unsubstituted heterocyclyl groups are of 1 to 12 (e.g., 1 to 11, 1 to 10, 1 to 9, 2 to 12, 2 to 11, 2 to 10, or 2 to 9) carbons. The term “heterocyclyl” also represents a heterocyclic compound having a bridged multicyclic structure in which one or more carbons and/or heteroatoms bridges two non-adjacent members of a monocyclic ring, e.g., a quinuclidinyl group. The term “heterocyclyl” includes bicyclic, tricyclic, and tetracyclic groups in which any of the above heterocyclic rings is fused to one, two, or three carbocyclic rings, e.g., an aryl ring, a cyclohexane ring, a cyclohexene ring, a cyclopentane ring, a cyclopentene ring, or another monocyclic heterocyclic ring, such as indolyl, quinolyl, isoquinolyl, tetrahydroquinolyl, benzofuryl, benzothienyl and the like. Examples of fused heterocyclyls include tropanes and 1,2,3,5,8,8a-hexahydroindolizine. Heterocyclics include pyrrolyl, pyrrolinyl, pyrrolidinyl, pyrazolyl, pyrazolinyl, pyrazolidinyl, imidazolyl, imidazolinyl, imidazolidinyl, pyridyl, piperidinyl, homopiperidinyl, pyrazinyl, piperazinyl, pyrimidinyl, pyridazinyl, oxazolyl, oxazolidinyl, isoxazolyl, isoxazolidiniyl, morpholinyl, thiomorpholinyl, thiazolyl, thiazolidinyl, isothiazolyl, isothiazolidinyl, indolyl, indazolyl, quinolyl, isoquinolyl, quinoxalinyl, dihydroquinoxalinyl, quinazolinyl, cinnolinyl, phthalazinyl, benzimidazolyl, benzothiazolyl, benzoxazolyl, benzothiadiazolyl, furyl, thienyl, thiazolidinyl, isothiazolyl, triazolyl, tetrazolyl, oxadiazolyl (e.g., 1,2,3-oxadiazolyl), purinyl, thiadiazolyl (e.g., 1,2,3-thiadiazolyl), tetrahydrofuranyl, dihydrofuranyl, tetrahydrothienyl, dihydrothienyl, dihydroindolyl, dihydroquinolyl, tetrahydroquinolyl, tetrahydroisoquinolyl, dihydroisoquinolyl, pyranyl, dihydropyranyl, dithiazolyl, benzofuranyl, isobenzofuranyl, benzothienyl, and the like, including dihydro and tetrahydro forms thereof, where one or more double bonds are reduced and replaced with hydrogens. Still other exemplary heterocyclyls include: 2,3,4,5-tetrahydro-2-oxo-oxazolyl; 2,3-dihydro-2-oxo-1H-imidazolyl; 2,3,4,5-tetrahydro-5-oxo-1H-pyrazolyl (e.g., 2,3,4,5-tetrahydro-2-phenyl-5-oxo-1H-pyrazolyl); 2,3,4,5-tetrahydro-2,4-dioxo-1H-imidazolyl (e.g., 2,3,4,5-tetrahydro-2,4-dioxo-5-methyl-5-phenyl-1H-imidazolyl); 2,3-dihydro-2-thioxo-1,3,4-oxadiazolyl (e.g., 2,3-dihydro-2-thioxo-5-phenyl-1,3,4-oxadiazolyl); 4,5-dihydro-5-oxo-1H-triazolyl (e.g., 4,5-dihydro-3-methyl-4-amino 5-oxo-1H-triazolyl); 1,2,3,4-tetrahydro-2,4-dioxopyridinyl (e.g., 1,2,3,4-tetrahydro-2,4-dioxo-3,3-diethylpyridinyl); 2,6-dioxo-piperidinyl (e.g., 2,6-dioxo-3-ethyl-3-phenylpiperidinyl); 1,6-dihydro-6-oxopyridiminyl; 1,6-dihydro-4-oxopyrimidinyl (e.g., 2-(methylthio)-1,6-dihydro-4-oxo-5-methylpyrimidin-1-yl); 1,2,3,4-tetrahydro-2,4-dioxopyrimidinyl (e.g., 1,2,3,4-tetrahydro-2,4-dioxo-3-ethylpyrimidinyl); 1,6-dihydro-6-oxo-pyridazinyl (e.g., 1,6-dihydro-6-oxo-3-ethylpyridazinyl); 1,6-dihydro-6-oxo-1,2,4-triazinyl (e.g., 1,6-dihydro-5-isopropyl-6-oxo-1,2,4-triazinyl); 2,3-dihydro-2-oxo-1H-indolyl (e.g., 3,3-dimethyl-2,3-dihydro-2-oxo-1H-indolyl and 2,3-dihydro-2-oxo-3,3′-spiropropane-1H-indol-1-yl); 1,3-dihydro-1-oxo-2H-iso-indolyl; 1,3-dihydro-1,3-dioxo-2H-iso-indolyl; 1H-benzopyrazolyl (e.g., 1-(ethoxycarbonyl)-1H-benzopyrazolyl); 2,3-dihydro-2-oxo-1H-benzimidazolyl (e.g., 3-ethyl-2,3-dihydro-2-oxo-1H-benzimidazolyl); 2,3-dihydro-2-oxo-benzoxazolyl (e.g., 5-chloro-2,3-dihydro-2-oxo-benzoxazolyl); 2,3-dihydro-2-oxo-benzoxazolyl; 2-oxo-2H-benzopyranyl; 1,4-benzodioxanyl; 1,3-benzodioxanyl; 2,3-dihydro-3-oxo,4H-1,3-benzothiazinyl; 3,4-dihydro-4-oxo-3H-quinazolinyl (e.g., 2-methyl-3,4-dihydro-4-oxo-3H-quinazolinyl); 1,2,3,4-tetrahydro-2,4-dioxo-3H-quinazolyl (e.g., 1-ethyl-1,2,3,4-tetrahydro-2,4-dioxo-3H-quinazolyl); 1,2,3,6-tetrahydro-2,6-dioxo-7H-purinyl (e.g., 1,2,3,6-tetrahydro-1,3-dimethyl-2,6-dioxo-7H-purinyl); 1,2,3,6-tetrahydro-2,6-dioxo-1H-purinyl (e.g., 1,2,3,6-tetrahydro-3,7-dimethyl-2,6-dioxo-1H-purinyl); 2-oxobenz[c,d]indolyl; 1,1-dioxo-2H-naphth[1,8-c,d]isothiazolyl; and 1,8-naphthylenedicarboxamido. Additional heterocyclics include 3,3a,4,5,6,6a-hexahydro-pyrrolo[3,4-b]pyrrol-(2H)-yl, and 2,5-diazabicyclo[2.2.1]heptan-2-yl, homopiperazinyl (or diazepanyl), tetrahydropyranyl, dithiazolyl, benzofuranyl, benzothienyl, oxepanyl, thiepanyl, azocanyl, oxecanyl, and thiocanyl. Heterocyclic groups also include groups of the formula

[chemical structure]

where

[0971] E′ is selected from the group consisting of —N— and —CH—; F′ is selected from the group consisting of —N═CH—, —NH—CH₂—, —NH—C(O)—, —NH—, —CH═N—, —CH₂—NH—, —C(O)—NH—, —CH═CH—, —CH₂—, —CH₂CH₂—, —CH₂O—, —OCH₂—, —O—, and —S—; and G′ is selected from the group consisting of —CH— and —N—. Any of the heterocyclyl groups mentioned herein may be optionally substituted with one, two, three, four or five substituents independently selected from the group consisting of: (1) C₁₋₇ acyl (e.g., carboxyaldehyde); (2) C₁₋₂₀ alkyl (e.g., C₁₋₆ alkyl, C₁₋₆ alkoxy-C₁₋₆ alkyl, C₁₋₆ alkylsulfinyl-C₁₋₆ alkyl, amino-C₁₋₆ alkyl, azido-C₁₋₆ alkyl, (carboxyaldehyde)-C₁₋₆ alkyl, halo-C₁₋₆ alkyl (e.g., perfluoroalkyl), hydroxy-C₁₋₆ alkyl, nitro-C₁₋₆ alkyl, or C₁₋₆ thioalkoxy-C₁₋₆ alkyl); (3) C₁₋₂₀ alkoxy (e.g., C₁₋₆ alkoxy, such as perfluoroalkoxy); (4) C₁₋₆ alkylsulfinyl; (5) C₆₋₁₀ aryl; (6) amino; (7) C₁₋₆ alk-C₆₋₁₀ aryl; (8) azido; (9) C₃₋₈ cycloalkyl; (10) C₁₋₆ alk-C₃₋₈ cycloalkyl; (11) halo; (12) C₁₋₁₂ heterocyclyl (e.g., C₂₋₁₂ heteroaryl); (13) (C₁₋₁₂ heterocyclyl)oxy; (14) hydroxy; (15) nitro; (16) C₁₋₂₀ thioalkoxy (e.g., C₁₋₆ thioalkoxy); (17) —(CH₂)—CO₂R^{A′}, where q is an integer from zero to four, and R^{A′} is selected from the group consisting of (a) C₁₋₆ alkyl, (b) C₆₋₁₀ aryl, (c) hydrogen, and (d) C₁₋₆ alk-C₆₋₁₀ aryl; (18) —(CH₂)_{q}CONR^{B′}R^{C′}, where q is an integer from zero to four and where R^{B′} and R^{C′} are independently selected from the group consisting of (a) hydrogen, (b) C₁₋₆ alkyl, (c) C₆₋₁₀ aryl, and (d) C₁₋₆ alk-C₆₋₁₀ aryl; (19) —(CH₂)—SO₂R^{D′}, where q is an integer from zero to four and where R^{D′} is selected from the group consisting of (a) C₁₋₆ alkyl, (b) C₆₋₁₀ aryl, and (c) C₁₋₆ alk-C₆₋₁₀ aryl; (20) —(CH₂)—SO₂NR^{E′}R^{F′}, where q is an integer from zero to four and where each of R^{E′} and R^{F′} is, independently, selected from the group consisting of (a) hydrogen, (b) C₁₋₆ alkyl, (c) C₆₋₁₀ aryl, and (d) C₁₋₆ alk-C₆₋₁₀ aryl; (21) thiol; (22) C₆₋₁₀ aryloxy; (23) C₃₋₈ cycloalkoxy; (24) arylalkoxy; (25) C₁₋₆ alk-C₁₋₁₂ heterocyclyl (e.g., C₁₋₆ alk-C₁₋₁₂ heteroaryl); (26) oxo; (27) (C₁₋₁₂ heterocyclyl)imino; (28) C₂₋₂₀ alkenyl; and (29) C₂₋₂₀ alkynyl. In some embodiments, each of these groups can be further substituted as described herein. For example, the alkylene group of a C₁-alkaryl or a C₁-alkheterocyclyl can be further substituted with an oxo group to afford the respective aryloyl and (heterocyclyl)oyl substituent group.

[0972] The term “(heterocyclyl)imino,” as used herein, represents a heterocyclyl group, as defined herein, attached to the parent molecular group through an imino group. In some embodiments, the heterocyclyl group can be substituted with 1, 2, 3, or 4 substituent groups as defined herein.

[0973] The term “(heterocyclyl)oxy,” as used herein, represents a heterocyclyl group, as defined herein, attached to the parent molecular group through an oxygen atom. In some embodiments, the heterocyclyl group can be substituted with 1, 2, 3, or 4 substituent groups as defined herein.

[0974] The term “(heterocyclyl)oyl,” as used herein, represents a heterocyclyl group, as defined herein, attached to the parent molecular group through a carbonyl group. In some embodiments, the heterocyclyl group can be substituted with 1, 2, 3, or 4 substituent groups as defined herein.

[0975] The term “hydrocarbon,” as used herein, represents a group consisting only of carbon and hydrogen atoms.

[0976] The term “hydroxy,” as used herein, represents an —OH group.

[0977] The term “hydroxyalkenyl,” as used herein, represents an alkenyl group, as defined herein, substituted by one to three hydroxy groups, with the proviso that no more than one hydroxy group may be attached to a single carbon atom of the alkyl group, and is exemplified by dihydroxypropenyl, hydroxyisopentenyl, and the like.

[0978] The term “hydroxyalkyl,” as used herein, represents an alkyl group, as defined herein, substituted by one to three hydroxy groups, with the proviso that no more than one hydroxy group may be attached to a single carbon atom of the alkyl group, and is exemplified by hydroxymethyl, dihydroxypropyl, and the like.

[0979] The term “isomer,” as used herein, means any tautomer, stereoisomer, enantiomer, or diastereomer of any compound of the invention. It is recognized that the compounds of the invention can have one or more chiral centers and/or double bonds and, therefore, exist as stereoisomers, such as double-bond isomers (i.e., geometric E/Z isomers) or diastereomers (e.g., enantiomers (i.e., (+) or (−)) or cis/trans isomers). According to the invention, the chemical structures depicted herein, and therefore the compounds of the invention, encompass all of the corresponding stereoisomers, that is, both the stereomerically pure form (e.g., geometrically pure, enantiomerically pure, or diastereomerically pure) and enantiomeric and stereoisomeric mixtures, e.g., racemates. Enantiomeric and stereoisomeric mixtures of compounds of the invention can typically be resolved into their component enantiomers or stereoisomers by well-known methods, such as chiral-phase gas chromatography, chiral-phase high performance liquid chromatography, crystallizing the compound as a chiral salt complex, or crystallizing the compound in a chiral solvent. Enantiomers and stereoisomers can also be obtained from stereomerically or enantiomerically pure intermediates, reagents, and catalysts by well-known asymmetric synthetic methods.

[0980] The term “N-protected amino,” as used herein, refers to an amino group, as defined herein, to which is attached one or two N-protecting groups, as defined herein.

[0981] The term “N-protecting group,” as used herein, represents those groups intended to protect an amino group against undesirable reactions during synthetic procedures. Commonly used N-protecting groups are disclosed in Greene, “Protective Groups in Organic Synthesis,” 3^{rd} Edition (John Wiley & Sons, New York, 1999), which is incorporated herein by reference. N-protecting groups include acyl, aryloyl, or carbamyl groups such as formyl, acetyl, propionyl, pivaloyl, t-butylacetyl, 2-chloroacetyl, 2-bromoacetyl, trifluoroacetyl, trichloroacetyl, phthalyl, o-nitrophenoxyacetyl, α-chlorobutyryl, benzoyl, 4-chlorobenzoyl, 4-bromobenzoyl, 4-nitrobenzoyl, and chiral auxiliaries such as protected or unprotected D, L or D, L-amino acids such as alanine, leucine, phenylalanine, and the like; sulfonyl-containing groups such as benzenesulfonyl, p-toluenesulfonyl, and the like; carbamate forming groups such as benzyloxycarbonyl, p-chlorobenzyloxycarbonyl, p-methoxybenzyloxycarbonyl, p-nitrobenzyloxycarbonyl, 2-nitrobenzyloxycarbonyl, p-bromobenzyloxycarbonyl, 3,4-dimethoxybenzyloxycarbonyl, 3,5-dimethoxybenzyloxycarbonyl, 2,4-dimethoxybenzyloxycarbonyl, 4-methoxybenzyloxycarbonyl, 2-nitro-4,5-dimethoxybenzyloxycarbonyl, 3,4,5-trimethoxybenzyloxycarbonyl, 1-(p-biphenylyl)-1-methylethoxycarbonyl, α,α-dimethyl-3,5-dimethoxybenzyloxycarbonyl, benzhydryloxy carbonyl, t-butyloxycarbonyl, diisopropylmethoxycarbonyl, isopropyloxycarbonyl, ethoxycarbonyl, methoxycarbonyl, allyloxycarbonyl, 2,2,2,-trichloroethoxycarbonyl, phenoxycarbonyl, 4-nitrophenoxy carbonyl, fluorenyl-9-methoxycarbonyl, cyclopentyloxycarbonyl, adamantyloxycarbonyl, cyclohexyloxycarbonyl, phenylthiocarbonyl, and the like, alkaryl groups such as benzyl, triphenylmethyl, benzyloxymethyl, and the like and silyl groups, such as trimethylsilyl, and the like. Preferred N-protecting groups are formyl, acetyl, benzoyl, pivaloyl, t-butylacetyl, alanyl, phenylsulfonyl, benzyl, t-butyloxycarbonyl (Boc), and benzyloxycarbonyl (Cbz).

[0982] The term “nitro,” as used herein, represents an —NO₂ group.

[0983] The term “oxo” as used herein, represents ═O.

[0984] The term “perfluoroalkyl,” as used herein, represents an alkyl group, as defined herein, where each hydrogen radical bound to the alkyl group has been replaced by a fluoride radical. Perfluoroalkyl groups are exemplified by trifluoromethyl, pentafluoroethyl, and the like.

[0985] The term “perfluoroalkoxy,” as used herein, represents an alkoxy group, as defined herein, where each hydrogen radical bound to the alkoxy group has been replaced by a fluoride radical. Perfluoroalkoxy groups are exemplified by trifluoromethoxy, pentafluoroethoxy, and the like.

[0986] The term “spirocyclyl,” as used herein, represents a C₂₋₇ alkylene diradical, both ends of which are bonded to the same carbon atom of the parent group to form a spirocyclic group, and also a C₁₋₆ heteroalkylene diradical, both ends of which are bonded to the same atom. The heteroalkylene radical forming the spirocyclyl group can containing one, two, three, or four heteroatoms independently selected from the group consisting of nitrogen, oxygen, and sulfur. In some embodiments, the spirocyclyl group includes one to seven carbons, excluding the carbon atom to which the diradical is attached. The spirocyclyl groups of the invention may be optionally substituted with 1, 2, 3, or 4 substituents provided herein as optional substituents for cycloalkyl and/or heterocyclyl groups.

[0987] The term “stereoisomer,” as used herein, refers to all possible different isomeric as well as conformational forms which a compound may possess (e.g., a compound of any formula described herein), in particular all possible stereochemically and conformationally isomeric forms, all diastereomers, enantiomers and/or conformers of the basic molecular structure. Some compounds of the present invention may exist in different tautomeric forms, all of the latter being included within the scope of the present invention.

[0988] The term “sulfoalkyl,” as used herein, represents an alkyl group, as defined herein, substituted by a sulfo group of —SO₃H. In some embodiments, the alkyl group can be further substituted with 1, 2, 3, or 4 substituent groups as described herein.

[0989] The term “sulfonyl,” as used herein, represents an —S(O)₂— group.

[0990] The term “thioalkaryl,” as used herein, represents a chemical substituent of formula —SR, where R is an alkaryl group. In some embodiments, the alkaryl group can be further substituted with 1, 2, 3, or 4 substituent groups as described herein.

[0991] The term “thioalkheterocyclyl,” as used herein, represents a chemical substituent of formula —SR, where R is an alkheterocyclyl group. In some embodiments, the alkheterocyclyl group can be further substituted with 1, 2, 3, or 4 substituent groups as described herein.

[0992] The term “thioalkoxy,” as used herein, represents a chemical substituent of formula —SR, where R is an alkyl group, as defined herein. In some embodiments, the alkyl group can be further substituted with 1, 2, 3, or 4 substituent groups as described herein.

[0993] The term “thiol” represents an —SH group.

[0994] Compound: As used herein, the term “compound,” as used herein, is meant to include all stereoisomers, geometric isomers, tautomers, and isotopes of the structures depicted.

[0995] The compounds described herein can be asymmetric (e.g., having one or more stereocenters). All stereoisomers, such as enantiomers and diastereomers, are intended unless otherwise indicated. Compounds of the present disclosure that contain asymmetrically substituted carbon atoms can be isolated in optically active or racemic forms. Methods on how to prepare optically active forms from optically active starting materials are known in the art, such as by resolution of racemic mixtures or by stereoselective synthesis. Many geometric isomers of olefins, C═N double bonds, and the like can also be present in the compounds described herein, and all such stable isomers are contemplated in the present disclosure. Cis and trans geometric isomers of the compounds of the present disclosure are described and may be isolated as a mixture of isomers or as separated isomeric forms.

[0996] Compounds of the present disclosure also include tautomeric forms. Tautomeric forms result from the swapping of a single bond with an adjacent double bond together with the concomitant migration of a proton. Tautomeric forms include prototropic tautomers which are isomeric protonation states having the same empirical formula and total charge. Example prototropic tautomers include ketone-enol pairs, amide-imidic acid pairs, lactam-lactim pairs, amide-imidic acid pairs, enamine-imine pairs, and annular forms where a proton can occupy two or more positions of a heterocyclic system, for example, 1H- and 3H-imidazole, 1H-, 2H- and 4H-1,2,4-triazole, 1H- and 2H-isoindole, and 1H- and 2H-pyrazole. Tautomeric forms can be in equilibrium or sterically locked into one form by appropriate substitution.

[0997] Compounds of the present disclosure also include all of the isotopes of the atoms occurring in the intermediate or final compounds. “Isotopes” refers to atoms having the same atomic number but different mass numbers resulting from a different number of neutrons in the nuclei. For example, isotopes of hydrogen include tritium and deuterium.

[0998] The compounds and salts of the present disclosure can be prepared in combination with solvent or water molecules to form solvates and hydrates by routine methods.

[0999] Conserved: As used herein, the term “conserved” refers to nucleotides or amino acid residues of a polynucleotide sequence or polypeptide sequence, respectively, that are those that occur unaltered in the same position of two or more sequences being compared. Nucleotides or amino acids that are relatively conserved are those that are conserved amongst more related sequences than nucleotides or amino acids appearing elsewhere in the sequences.

[1000] In some embodiments, two or more sequences are said to be “completely conserved” if they are 100% identical to one another. In some embodiments, two or more sequences are said to be “highly conserved” if they are at least 70% identical, at least 80% identical, at least 90% identical, or at least 95% identical to one another. In some embodiments, two or more sequences are said to be “highly conserved” if they are about 70% identical, about 80% identical, about 90% identical, about 95%, about 98%, or about 99% identical to one another. In some embodiments, two or more sequences are said to be “conserved” if they are at least 30% identical, at least 40% identical, at least 50% identical, at least 60% identical, at least 70% identical, at least 80% identical, at least 90% identical, or at least 95% identical to one another. In some embodiments, two or more sequences are said to be “conserved” if they are about 30% identical, about 40% identical, about 50% identical, about 60% identical, about 70% identical, about 80% identical, about 90% identical, about 95% identical, about 98% identical, or about 99% identical to one another. Conservation of sequence may apply to the entire length of an oligonucleotide or polypeptide or may apply to a portion, region or feature thereof. Conservation of sequence may apply to the entire length of an oligonucleotide or polypeptide or may apply to a portion, region or feature thereof.

[1001] Delivery: As used herein, “delivery” refers to the act or manner of delivering a compound, substance, entity, moiety, cargo or payload.

[1002] Delivery Agent: As used herein, “delivery agent” refers to any substance which facilitates, at least in part, the in vivo delivery of a modified nucleic acid to targeted cells.

[1003] Detectable label: As used herein, “detectable label” refers to one or more markers, signals, or moieties which are attached, incorporated or associated with another entity that is readily detected by methods known in the art including radiography, fluorescence, chemiluminescence, enzymatic activity, absorbance and the like. Detectable labels include radioisotopes, fluorophores, chromophores, enzymes, dyes, metal ions, ligands such as biotin, avidin, streptavidin and haptens, quantum dots, and the like. Detectable labels may be located at any position in the peptides or proteins disclosed herein. They may be within the amino acids, the peptides, or proteins, or located at the N- or C-termini.

[1004] Device: As used herein, the term “device” means a piece of equipment designed to serve a special purpose. The device may comprise many features such as, but not limited to, components, electrical (e.g., wiring and circuits), storage modules and analysis modules.

[1005] Disease: As used herein, the term “disease” refers to an abnormal condition affecting the body of an organism often showing specific bodily symptoms.

[1006] Disorder: As used herein, the term “disorder,” refers to a disruption of or an interference with normal functions or established systems of the body.

[1007] Digest: As used herein, the term “digest” means to break apart into smaller pieces or components. When referring to polypeptides or proteins, digestion results in the production of peptides.

[1008] Encoded protein cleavage signal: As used herein, “encoded protein cleavage signal” refers to the nucleotide sequence which encodes a protein cleavage signal.

[1009] Engineered: As used herein, embodiments of the invention are “engineered” when they are designed to have a feature or property, whether structural or chemical, that varies from a starting point, wild type or native molecule.

[1010] Exosome: As used herein, “exosome” is a vesicle secreted by mammalian cells or a complex involved in RNA degradation.

[1011] Expression: As used herein, “expression” of a nucleic acid sequence refers to one or more of the following events: (1) production of an RNA template from a DNA sequence (e.g., by transcription); (2) processing of an RNA transcript (e.g., by splicing, editing, 5′ cap formation, and/or 3′ end processing); (3) translation of an RNA into a polypeptide or protein; and (4) post-translational modification of a polypeptide or protein.

[1012] Feature: As used herein, a “feature” refers to a characteristic, a property, or a distinctive element.

[1013] Formulation: As used herein, a “formulation” includes at least a modified nucleic acid and a delivery agent.

[1014] Fragment: A “fragment,” as used herein, refers to a portion. For example, fragments of proteins may comprise polypeptides obtained by digesting full-length protein isolated from cultured cells.

[1015] Functional: As used herein, a “functional” biological molecule is a biological molecule in a form in which it exhibits a property and/or activity by which it is characterized.

[1016] Heterologous: As used herein, the term “heterologous” in reference to an untranslated region such as a 5′UTR or 3′UTR means a region of nucleic acid, particularly untranslated nucleic acid which is not naturally found with the coding region encoded on the same or instant polynucleotide, primary construct or mmRNA. Homologous UTRs for example would represent those UTRs which are naturally found associated with the coding region of the mRNA, such as the wild type UTR.

[1017] Homology: As used herein, the term “homology” refers to the overall relatedness between polymeric molecules, e.g. between nucleic acid molecules (e.g. DNA molecules and/or RNA molecules) and/or between polypeptide molecules. In some embodiments, polymeric molecules are considered to be “homologous” to one another if their sequences are at least 25%, at least 30%, at least 35%, at least 40%, at least 45%, at least 50%, at least 55%, at least 60%, at least 65%, at least 70%, at least 75%, at least 80%, at least 85%, at least 90%, at least 95%, or at least 99% identical. In some embodiments, polymeric molecules are considered to be “homologous” to one another if their sequences are at least 25%, at least 30%, at least 35%, at least 40%, at least 45%, at least 50%, at least 55%, at least 60%, at least 65%, at least 70%, at least 75%, at least 80%, at least 85%, at least 90%, at least 95%, or at least 99% similar. The term “homologous” necessarily refers to a comparison between at least two sequences (polynucleotide or polypeptide sequences).

[1018] In accordance with the invention, two polynucleotide sequences are considered to be homologous if the polypeptides they encode are at least about 50% identical, at least about 60% identical, at least about 70% identical, at least about 80% identical, or at least about 90% identical for at least one stretch of at least about 20 amino acids.

[1019] In some embodiments, homologous polynucleotide sequences are characterized by the ability to encode a stretch of at least 4-5 uniquely specified amino acids. For polynucleotide sequences less than 60 nucleotides in length, homology is determined by the ability to encode a stretch of at least 4-5 uniquely specified amino acids. In accordance with the invention, two protein sequences are considered to be homologous if the proteins are at least about 50% identical, at least about 60% identical, at least about 70% identical, at least about 80% identical, or at least about 90% identical for at least one stretch of at least about 20 amino acids.

[1020] Identity: As used herein, the term “identity” refers to the overall relatedness between polymeric molecules, e.g., between oligonucleotide molecules (e.g. DNA molecules and/or RNA molecules) and/or between polypeptide molecules. Calculation of the percent identity of two polynucleotide sequences, for example, can be performed by aligning the two sequences for optimal comparison purposes (e.g., gaps can be introduced in one or both of a first and a second nucleic acid sequences for optimal alignment and non-identical sequences can be disregarded for comparison purposes). In certain embodiments, the length of a sequence aligned for comparison purposes is at least 30%, at least 40%, at least 50%, at least 60%, at least 70%, at least 80%, at least 90%, at least 95%, or 100% of the length of the reference sequence. The nucleotides at corresponding nucleotide positions are then compared. When a position in the first sequence is occupied by the same nucleotide as the corresponding position in the second sequence, then the molecules are identical at that position. The percent identity between the two sequences is a function of the number of identical positions shared by the sequences, taking into account the number of gaps, and the length of each gap, which needs to be introduced for optimal alignment of the two sequences. The comparison of sequences and determination of percent identity between two sequences can be accomplished using a mathematical algorithm. For example, the percent identity between two nucleotide sequences can be determined using methods such as those described in Computational Molecular Biology, Lesk, A. M., ed., Oxford University Press, New York, 1988; Biocomputing: Informatics and Genome Projects, Smith, D. W., ed., Academic Press, New York, 1993; Sequence Analysis in Molecular Biology, von Heinje, G., Academic Press, 1987; Computer Analysis of Sequence Data, Part I, Griffin, A. M., and Griffin, H. G., eds., Humana Press, New Jersey, 1994; and Sequence Analysis Primer, Gribskov, M. and Devereux, J., eds., M Stockton Press, New York, 1991; each of which is incorporated herein by reference. For example, the percent identity between two nucleotide sequences can be determined using the algorithm of Meyers and Miller (CABIOS, 1989, 4:11-17), which has been incorporated into the ALIGN program (version 2.0) using a PAM120 weight residue table, a gap length penalty of 12 and a gap penalty of 4. The percent identity between two nucleotide sequences can, alternatively, be determined using the GAP program in the GCG software package using an NWSgapdna.CMP matrix. Methods commonly employed to determine percent identity between sequences include, but are not limited to those disclosed in Carillo, H., and Lipman, D., SIAM J Applied Math., 48:1073 (1988); incorporated herein by reference. Techniques for determining identity are codified in publicly available computer programs. Exemplary computer software to determine homology between two sequences include, but are not limited to, GCG program package, Devereux, J., et al., Nucleic Acids Research, 12(1), 387 (1984)), BLASTP, BLASTN, and FASTA Atschul, S. F. et al., J. Molec. Biol., 215, 403 (1990)).

[1021] Inhibit expression of a gene: As used herein, the phrase “inhibit expression of a gene” means to cause a reduction in the amount of an expression product of the gene. The expression product can be an RNA transcribed from the gene (e.g., an mRNA) or a polypeptide translated from an mRNA transcribed from the gene. Typically a reduction in the level of an mRNA results in a reduction in the level of a polypeptide translated therefrom. The level of expression may be determined using standard techniques for measuring mRNA or protein.

[1022] In vitro: As used herein, the term “in vitro” refers to events that occur in an artificial environment, e.g., in a test tube or reaction vessel, in cell culture, in a Petri dish, etc., rather than within an organism (e.g., animal, plant, or microbe).

[1023] In vivo: As used herein, the term “in vivo” refers to events that occur within an organism (e.g., animal, plant, or microbe or cell or tissue thereof).

[1024] Isolated: As used herein, the term “isolated” refers to a substance or entity that has been separated from at least some of the components with which it was associated (whether in nature or in an experimental setting). Isolated substances may have varying levels of purity in reference to the substances from which they have been associated. Isolated substances and/or entities may be separated from at least about 10%, about 20%, about 30%, about 40%, about 50%, about 60%, about 70%, about 80%, about 90%, or more of the other components with which they were initially associated. In some embodiments, isolated agents are more than about 80%, about 85%, about 90%, about 91%, about 92%, about 93%, about 94%, about 95%, about 96%, about 97%, about 98%, about 99%, or more than about 99% pure. As used herein, a substance is “pure” if it is substantially free of other components. Substantially isolated: By “substantially isolated” is meant that the compound is substantially separated from the environment in which it was formed or detected. Partial separation can include, for example, a composition enriched in the compound of the present disclosure. Substantial separation can include compositions containing at least about 50%, at least about 60%, at least about 70%, at least about 80%, at least about 90%, at least about 95%, at least about 97%, or at least about 99% by weight of the compound of the present disclosure, or salt thereof. Methods for isolating compounds and their salts are routine in the art.

[1025] Linker: As used herein, a linker refers to a group of atoms, e.g., 10-1,000 atoms, and can be comprised of the atoms or groups such as, but not limited to, carbon, amino, alkylamino, oxygen, sulfur, sulfoxide, sulfonyl, carbonyl, and imine. The linker can be attached to a modified nucleoside or nucleotide on the nucleobase or sugar moiety at a first end, and to a payload, e.g., a detectable or therapeutic agent, at a second end. The linker may be of sufficient length as to not interfere with incorporation into a nucleic acid sequence. The linker can be used for any useful purpose, such as to form modified mRNA multimers (e.g., through linkage of two or more modified nucleic acids) or modified mRNA conjugates, as well as to administer a payload, as described herein. Examples of chemical groups that can be incorporated into the linker include, but are not limited to, alkyl, alkenyl, alkynyl, amido, amino, ether, thioether, ester, alkylene, heteroalkylene, aryl, or heterocyclyl, each of which can be optionally substituted, as described herein. Examples of linkers include, but are not limited to, unsaturated alkanes, polyethylene glycols (e.g., ethylene or propylene glycol monomeric units, e.g., diethylene glycol, dipropylene glycol, triethylene glycol, tripropylene glycol, tetraethylene glycol, or tetraethylene glycol), and dextran polymers, Other examples include, but are not limited to, cleavable moieties within the linker, such as, for example, a disulfide bond (—S—S—) or an azo bond (—N═N—), which can be cleaved using a reducing agent or photolysis. Non-limiting examples of a selectively cleavable bond include an amido bond can be cleaved for example by the use of tris(2-carboxyethyl)phosphine (TCEP), or other reducing agents, and/or photolysis, as well as an ester bond can be cleaved for example by acidic or basic hydrolysis.

[1026] Modified: As used herein “modified” refers to a changed state or structure of a molecule of the invention. Molecules may be modified in many ways including chemically, structurally, and functionally. In one embodiment, the mRNA molecules of the present invention are modified by the introduction of non-natural nucleosides and/or nucleotides.

[1027] Naturally occurring: As used herein, “naturally occurring” means existing in nature without artificial aid.

[1028] Open reading frame: As used herein, “open reading frame” or “ORF” refers to a sequence which does not contain a stop codon in a given reading frame.

[1029] Operably linked: As used herein, the phrase “operably linked” refers to a functional connection between two or more molecules, constructs, transcripts, entities, moieties or the like.

[1030] Patient: As used herein, “patient” refers to a subject who may seek or be in need of treatment, requires treatment, is receiving treatment, will receive treatment, or a subject who is under care by a trained professional for a particular disease or condition.

[1031] Optionally substituted: Herein a phrase of the form “optionally substituted X” (e.g., optionally substituted alkyl) is intended to be equivalent to “X, wherein X is optionally substituted” (e.g., “alkyl, wherein said alkyl is optionally substituted”). It is not intended to mean that the feature “X” (e.g. alkyl) per se is optional. Peptide: As used herein, “peptide” is less than or equal to 50 amino acids long, e.g., about 5, 10, 15, 20, 25, 30, 35, 40, 45, or 50 amino acids long.

[1032] Peptide: As used herein, “peptide” is less than or equal to 50 amino acids long, e.g., about 5, 10, 15, 20, 25, 30, 35, 40, 45, or 50 amino acids long.

[1033] Pharmaceutical composition: The phrase “pharmaceutical composition” refers to a composition that alters the etiology of a disease, disorder and/or condition.

[1034] Pharmaceutically acceptable: The phrase “pharmaceutically acceptable” is employed herein to refer to those compounds, materials, compositions, and/or dosage forms which are, within the scope of sound medical judgment, suitable for use in contact with the tissues of human beings and animals without excessive toxicity, irritation, allergic response, or other problem or complication, commensurate with a reasonable benefit/risk ratio.

[1035] Pharmaceutically acceptable excipients: The phrase “pharmaceutically acceptable excipient,” as used herein, refers any ingredient other than the compounds described herein (for example, a vehicle capable of suspending or dissolving the active compound) and having the properties of being substantially nontoxic and non-inflammatory in a patient. Excipients may include, for example: antiadherents, antioxidants, binders, coatings, compression aids, disintegrants, dyes (colors), emollients, emulsifiers, fillers (diluents), film formers or coatings, flavors, fragrances, glidants (flow enhancers), lubricants, preservatives, printing inks, sorbents, suspensing or dispersing agents, sweeteners, and waters of hydration. Exemplary excipients include, but are not limited to: butylated hydroxytoluene (BHT), calcium carbonate, calcium phosphate (dibasic), calcium stearate, croscarmellose, crosslinked polyvinyl pyrrolidone, citric acid, crospovidone, cysteine, ethylcellulose, gelatin, hydroxypropyl cellulose, hydroxypropyl methylcellulose, lactose, magnesium stearate, maltitol, mannitol, methionine, methylcellulose, methyl paraben, microcrystalline cellulose, polyethylene glycol, polyvinyl pyrrolidone, povidone, pregelatinized starch, propyl paraben, retinyl palmitate, shellac, silicon dioxide, sodium carboxymethyl cellulose, sodium citrate, sodium starch glycolate, sorbitol, starch (corn), stearic acid, sucrose, talc, titanium dioxide, vitamin A, vitamin E, vitamin C, and xylitol.

[1036] Pharmaceutically acceptable salts: The present disclosure also includes pharmaceutically acceptable salts of the compounds described herein. As used herein, “pharmaceutically acceptable salts” refers to derivatives of the disclosed compounds wherein the parent compound is modified by converting an existing acid or base moiety to its salt form (e.g., by reacting the free base group with a suitable organic acid). Examples of pharmaceutically acceptable salts include, but are not limited to, mineral or organic acid salts of basic residues such as amines; alkali or organic salts of acidic residues such as carboxylic acids; and the like. Representative acid addition salts include acetate, adipate, alginate, ascorbate, aspartate, benzenesulfonate, benzoate, bisulfate, borate, butyrate, camphorate, camphorsulfonate, citrate, cyclopentanepropionate, digluconate, dodecylsulfate, ethanesulfonate, fumarate, glucoheptonate, glycerophosphate, hemisulfate, heptonate, hexanoate, hydrobromide, hydrochloride, hydroiodide, 2-hydroxy-ethanesulfonate, lactobionate, lactate, laurate, lauryl sulfate, malate, maleate, malonate, methanesulfonate, 2-naphthalenesulfonate, nicotinate, nitrate, oleate, oxalate, palmitate, pamoate, pectinate, persulfate, 3-phenylpropionate, phosphate, picrate, pivalate, propionate, stearate, succinate, sulfate, tartrate, thiocyanate, toluenesulfonate, undecanoate, valerate salts, and the like. Representative alkali or alkaline earth metal salts include sodium, lithium, potassium, calcium, magnesium, and the like, as well as nontoxic ammonium, quaternary ammonium, and amine cations, including, but not limited to ammonium, tetramethylammonium, tetraethylammonium, methylamine, dimethylamine, trimethylamine, triethylamine, ethylamine, and the like. The pharmaceutically acceptable salts of the present disclosure include the conventional non-toxic salts of the parent compound formed, for example, from non-toxic inorganic or organic acids. The pharmaceutically acceptable salts of the present disclosure can be synthesized from the parent compound which contains a basic or acidic moiety by conventional chemical methods. Generally, such salts can be prepared by reacting the free acid or base forms of these compounds with a stoichiometric amount of the appropriate base or acid in water or in an organic solvent, or in a mixture of the two; generally, nonaqueous media like ether, ethyl acetate, ethanol, isopropanol, or acetonitrile are preferred. Lists of suitable salts are found in Remington's Pharmaceutical Sciences, 17^{th} ed., Mack Publishing Company, Easton, Pa., 1985, p. 1418 and Journal of Pharmaceutical Science, 66, 2 (1977), each of which is incorporated herein by reference in its entirety.

[1037] Pharmacokinetic: As used herein, “pharmacokinetic” refers to any one or more properties of a molecule or compound as it relates to the determination of the fate of substances administered to a living organism. Pharmacokinetics is divided into several areas including the extent and rate of absorption, distribution, metabolism and excretion. This is commonly referred to as ADME where: (A) Absorption is the process of a substance entering the blood circulation; (D) Distribution is the dispersion or dissemination of substances throughout the fluids and tissues of the body; (M) Metabolism (or Biotransformation) is the irreversible transformation of parent compounds into daughter metabolites; and (E) Excretion (or Elimination) refers to the elimination of the substances from the body. In rare cases, some drugs irreversibly accumulate in body tissue.

[1038] Pharmaceutically acceptable solvate: The term “pharmaceutically acceptable solvate,” as used herein, means a compound of the invention wherein molecules of a suitable solvent are incorporated in the crystal lattice. A suitable solvent is physiologically tolerable at the dosage administered. For example, solvates may be prepared by crystallization, recrystallization, or precipitation from a solution that includes organic solvents, water, or a mixture thereof. Examples of suitable solvents are ethanol, water (for example, mono-, di-, and tri-hydrates), N-methylpyrrolidinone (NMP), dimethyl sulfoxide (DMSO), N,N′-dimethylformamide (DMF), N,N′-dimethylacetamide (DMAC), 1,3-dimethyl-2-imidazolidinone (DMEU), 1,3-dimethyl-3,4,5,6-tetrahydro-2-(1H)-pyrimidinone (DMPU), acetonitrile (ACN), propylene glycol, ethyl acetate, benzyl alcohol, 2-pyrrolidone, benzyl benzoate, and the like. When water is the solvent, the solvate is referred to as a “hydrate.”

[1039] Physicochemical: As used herein, “physicochemical” means of or relating to a physical and/or chemical property.

[1040] Preventing: As used herein, the term “preventing” refers to partially or completely delaying onset of an infection, disease, disorder and/or condition; partially or completely delaying onset of one or more symptoms, features, or clinical manifestations of a particular infection, disease, disorder, and/or condition; partially or completely delaying onset of one or more symptoms, features, or manifestations of a particular infection, disease, disorder, and/or condition; partially or completely delaying progression from an infection, a particular disease, disorder and/or condition; and/or decreasing the risk of developing pathology associated with the infection, the disease, disorder, and/or condition.

[1041] Prodrug: The present disclosure also includes prodrugs of the compounds described herein. As used herein, “prodrugs” refer to any substance, molecule or entity which is in a form predicate for that substance, molecule or entity to act as a therapeutic upon chemical or physical alteration. Prodrugs may by covalently bonded or sequestested in some way and which release or are converted into the active drug moiety prior to, upon or after administered to a mammalian subject. Prodrugs can be prepared by modifying functional groups present in the compounds in such a way that the modifications are cleaved, either in routine manipulation or in vivo, to the parent compounds. Prodrugs include compounds wherein hydroxyl, amino, sulfhydryl, or carboxyl groups are bonded to any group that, when administered to a mammalian subject, cleaves to form a free hydroxyl, amino, sulfhydryl, or carboxyl group respectively. Preparation and use of prodrugs is discussed in T. Higuchi and V. Stella, “Pro-drugs as Novel Delivery Systems,” Vol. 14 of the A.C.S. Symposium Series, and in Bioreversible Carriers in Drug Design, ed. Edward B. Roche, American Pharmaceutical Association and Pergamon Press, 1987, both of which are hereby incorporated by reference in their entirety.

[1042] Protein cleavage site: As used herein, “protein cleavage site” refers to a site where controlled cleavage of the amino acid chain can be accomplished by chemical, enzymatic or photochemical means.

[1043] Protein cleavage signal: As used herein “protein cleavage signal” refers to at least one amino acid that flags or marks a polypeptide for cleavage.

[1044] Protein of interest: As used herein, the terms “proteins of interest” or “desired proteins” include those provided herein and fragments, mutants, variants, and alterations thereof.

[1045] Proximal: As used herein, the term “proximal” means situated nearer to the center or to a point or region of interest.

[1046] Pseudouridine: As used herein, pseudouridine refers to the C-glycoside isomer of the nucleoside uridine. A “pseudouridine analog” is any modification, variant, isoform or derivative of pseudouridine. For example, pseudouridine analogs include but are not limited to 1-carboxymethyl-pseudouridine, 1-propynyl-pseudouridine, 1-taurinomethyl-pseudouridine, 1-taurinomethyl-4-thio-pseudouridine, 1-methyl-pseudouridine (m¹ψ), 1-methyl-4-thio-pseudouridine (m¹s⁴ψ)^{,} 4-thio-1-methyl-pseudouridine, 3-methyl-pseudouridine (m³ψ), 2-thio-1-methyl-pseudouridine, 1-methyl-1-deaza-pseudouridine, 2-thio-1-methyl-1-deaza-pseudouridine, dihydropseudouridine, 2-thio-dihydropseudouridine, 2-methoxyuridine, 2-methoxy-4-thio-uridine, 4-methoxy-pseudouridine, 4-methoxy-2-thio-pseudouridine, N1-methyl-pseudouridine, 1-methyl-3-(3-amino-3-carboxypropyl)pseudouridine (acp³ψ), and 2′-O-methyl-pseudouridine (ψm).

[1047] Purified: As used herein, “purify,” “purified,” “purification” means to make substantially pure or clear from unwanted components, material defilement, admixture or imperfection.

[1048] Reducing the effect: As used herein, the phrase “reducing the effect” when referring to symptoms, means reducing, eliminating or alleviating the symptom in the subject. It does not necessarily mean that the symptom will, in fact, be completely eliminated, reduced or alleviated.

[1049] Sample: As used herein, the term “sample” or “biological sample” refers to a subset of its tissues, cells or component parts (e.g. body fluids, including but not limited to blood, mucus, lymphatic fluid, synovial fluid, cerebrospinal fluid, saliva, amniotic fluid, amniotic cord blood, urine, vaginal fluid and semen). A sample further may include a homogenate, lysate or extract prepared from a whole organism or a subset of its tissues, cells or component parts, or a fraction or portion thereof, including but not limited to, for example, plasma, serum, spinal fluid, lymph fluid, the external sections of the skin, respiratory, intestinal, and genitourinary tracts, tears, saliva, milk, blood cells, tumors, organs. A sample further refers to a medium, such as a nutrient broth or gel, which may contain cellular components, such as proteins or nucleic acid molecule.

[1050] Sample: As used herein, the term “sample” or “biological sample” refers to a subset of its tissues, cells or component parts (e.g. body fluids, including but not limited to blood, mucus, lymphatic fluid, synovial fluid, cerebrospinal fluid, saliva, amniotic fluid, amniotic cord blood, urine, vaginal fluid and semen). A sample further may include a homogenate, lysate or extract prepared from a whole organism or a subset of its tissues, cells or component parts, or a fraction or portion thereof, including but not limited to, for example, plasma, serum, spinal fluid, lymph fluid, the external sections of the skin, respiratory, intestinal, and genitourinary tracts, tears, saliva, milk, blood cells, tumors, organs. A sample further refers to a medium, such as a nutrient broth or gel, which may contain cellular components, such as proteins or nucleic acid molecule.

[1051] Seed: As used herein with respect to micro RNA (miRNA), a miRNA “seed” is a sequence with nucleotide identity at positions 2-8 of the mature miRNA. In one embodiment, a miRNA seed comprises positions 2-7 of the mature miRNA.

[1052] Side effect: As used herein, the phrase “side effect” refers to a secondary effect of treatment.

[1053] Signal Peptide Sequences: As used herein, the phrase “signal peptide sequences” refers to a sequence which can direct the transport or localization of a protein.

[1054] Similarity: As used herein, the term “similarity” refers to the overall relatedness between polymeric molecules, e.g. between polynucleotide molecules (e.g. DNA molecules and/or RNA molecules) and/or between polypeptide molecules. Calculation of percent similarity of polymeric molecules to one another can be performed in the same manner as a calculation of percent identity, except that calculation of percent similarity takes into account conservative substitutions as is understood in the art.

[1055] Split dose: As used herein, a “split dose” is the division of single unit dose or total daily dose into two or more doses.

[1056] Stable: As used herein “stable” refers to a compound that is sufficiently robust to survive isolation to a useful degree of purity from a reaction mixture, and preferably capable of formulation into an efficacious therapeutic agent.

[1057] Stabilized: As used herein, the term “stabilize”, “stabilized,” “stabilized region” means to make or become stable.

[1058] Subject: As used herein, the term “subject” or “patient” refers to any organism to which a composition in accordance with the invention may be administered, e.g., for experimental, diagnostic, prophylactic, and/or therapeutic purposes. Typical subjects include animals (e.g., mammals such as mice, rats, rabbits, non-human primates, and humans) and/or plants.

[1059] Substantially: As used herein, the term “substantially” refers to the qualitative condition of exhibiting total or near-total extent or degree of a characteristic or property of interest. One of ordinary skill in the biological arts will understand that biological and chemical phenomena rarely, if ever, go to completion and/or proceed to completeness or achieve or avoid an absolute result. The term “substantially” is therefore used herein to capture the potential lack of completeness inherent in many biological and chemical phenomena.

[1060] Substantially equal: As used herein as it relates to time differences between doses, the term means plus/minus 2%.

[1061] Substantially simultaneously: As used herein and as it relates to plurality of doses, the term means within 15 seconds.

[1062] Suffering from: An individual who is “suffering from” a disease, disorder, and/or condition has been diagnosed with or displays one or more symptoms of a disease, disorder, and/or condition.

[1063] Susceptible to: An individual who is “susceptible to” a disease, disorder, and/or condition has not been diagnosed with and/or may not exhibit symptoms of the disease, disorder, and/or condition but harbors a propensity to develop a disease or its symptoms. In some embodiments, an individual who is susceptible to a disease, disorder, and/or condition (for example, cancer) may be characterized by one or more of the following: (1) a genetic mutation associated with development of the disease, disorder, and/or condition; (2) a genetic polymorphism associated with development of the disease, disorder, and/or condition; (3) increased and/or decreased expression and/or activity of a protein and/or nucleic acid associated with the disease, disorder, and/or condition; (4) habits and/or lifestyles associated with development of the disease, disorder, and/or condition; (5) a family history of the disease, disorder, and/or condition; and (6) exposure to and/or infection with a microbe associated with development of the disease, disorder, and/or condition. In some embodiments, an individual who is susceptible to a disease, disorder, and/or condition will develop the disease, disorder, and/or condition. In some embodiments, an individual who is susceptible to a disease, disorder, and/or condition will not develop the disease, disorder, and/or condition.

[1064] Symptom: As used herein, the term “symptom” is a signal of a disease, disorder and/or condition. For example, symptoms may be felt or noticed by the subject who has them but may not be easily accessed by looking at a subject's outward appearance or behaviors. Examples of symptoms include, but are not limited to, weakness, aches and pains, fever, fatigue, weight loss, blood clots, increased blood calcium levels, low white blood cell count, short of breath, dizziness, headaches, hyperpigmentation, jaundice, erthema, pruritis, excessive hair growth, change in bowel habits, change in bladder function, long-lasting sores, white patches inside the mouth, white spots on the tongue, unusual bleeding or discharge, thickening or lump on parts of the body, indigestion, trouble swallowing, changes in warts or moles, change in new skin and nagging cough or hoarseness.

[1065] Synthetic: The term “synthetic” means produced, prepared, and/or manufactured by the hand of man. Synthesis of polynucleotides or polypeptides or other molecules of the present invention may be chemical or enzymatic.

[1066] Targeted Cells: As used herein, “targeted cells” refers to any one or more cells of interest. The cells may be found in vitro, in vivo, in situ or in the tissue or organ of an organism. The organism may be an animal, preferably a mammal, more preferably a human and most preferably a patient.

[1067] Terminal region: As used herein, the term “terminal region” refers to a region on the 5′ or 3′ end of a region of linked nucleosides encoding a polypeptide of interest or coding region.

[1068] Terminally optimized: The term “terminally optimized” when referring to nucleic acids means the terminal regions of the nucleic acid are improved over the native terminal regions.

[1069] Therapeutic Agent: The term “therapeutic agent” refers to any agent that, when administered to a subject, has a therapeutic, diagnostic, and/or prophylactic effect and/or elicits a desired biological and/or pharmacological effect.

[1070] Therapeutically effective amount: As used herein, the term “therapeutically effective amount” means an amount of an agent to be delivered (e.g., nucleic acid, drug, therapeutic agent, diagnostic agent, prophylactic agent, etc.) that is sufficient, when administered to a subject suffering from or susceptible to a disease, disorder, and/or condition, to treat, improve symptoms of, diagnose, prevent, and/or delay the onset of the disease, disorder, and/or condition.

[1071] Therapeutically effective outcome: As used herein, “therapeutically effective amount” means an amount of an agent to be delivered (e.g., nucleic acid, drug, therapeutic agent, diagnostic agent, prophylactic agent, etc.) that is sufficient, when administered to a subject suffering from or susceptible to a disease, disorder, and/or condition, to treat, improve symptoms of, diagnose, prevent, and/or delay the onset of the disease, disorder, and/or condition.

1. Total daily dose: As used herein, a “total daily dose” is an amount given or prescribed in 24 hr period. It may be administered as a single unit dose.

[1072] Transcription factor: As used herein, the term “transcription factor” refers to a DNA-binding protein that regulates transcription of DNA into RNA, for example, by activation or repression of transcription. Some transcription factors effect regulation of transcription alone, while others act in concert with other proteins. Some transcription factor can both activate and repress transcription under certain conditions. In general, transcription factors bind a specific target sequence or sequences highly similar to a specific consensus sequence in a regulatory region of a target gene. Transcription factors may regulate transcription of a target gene alone or in a complex with other molecules.

[1073] Treating: As used herein, the term “treating” refers to partially or completely alleviating, ameliorating, improving, relieving, delaying onset of, inhibiting progression of, reducing severity of, and/or reducing incidence of one or more symptoms or features of a particular disease, disorder, and/or condition. For example, “treating” cancer may refer to inhibiting survival, growth, and/or spread of a tumor. Treatment may be administered to a subject who does not exhibit signs of a disease, disorder, and/or condition and/or to a subject who exhibits only early signs of a disease, disorder, and/or condition for the purpose of decreasing the risk of developing pathology associated with the disease, disorder, and/or condition.

[1074] Unmodified: As used herein, “unmodified” refers to any substance, compound or molecule prior to being changed in any way. Unmodified may, but does not always, refer to the wild type or native form of a biomolecule. Molecules may undergo a series of modifications whereby each modified molecule may serve as the “unmodified” starting molecule for a subsequent modification.

### Equivalents and Scope

[1075] Those skilled in the art will recognize, or be able to ascertain using no more than routine experimentation, many equivalents to the specific embodiments in accordance with the invention described herein. The scope of the present invention is not intended to be limited to the above Description, but rather is as set forth in the appended claims.

[1076] In the claims, articles such as “a,” “an,” and “the” may mean one or more than one unless indicated to the contrary or otherwise evident from the context. Claims or descriptions that include “or” between one or more members of a group are considered satisfied if one, more than one, or all of the group members are present in, employed in, or otherwise relevant to a given product or process unless indicated to the contrary or otherwise evident from the context. The invention includes embodiments in which exactly one member of the group is present in, employed in, or otherwise relevant to a given product or process. The invention includes embodiments in which more than one, or all of the group members are present in, employed in, or otherwise relevant to a given product or process.

[1077] It is also noted that the term “comprising” is intended to be open and permits the inclusion of additional elements or steps.

[1078] Where ranges are given, endpoints are included. Furthermore, it is to be understood that unless otherwise indicated or otherwise evident from the context and understanding of one of ordinary skill in the art, values that are expressed as ranges can assume any specific value or subrange within the stated ranges in different embodiments of the invention, to the tenth of the unit of the lower limit of the range, unless the context clearly dictates otherwise.

[1079] In addition, it is to be understood that any particular embodiment of the present invention that falls within the prior art may be explicitly excluded from any one or more of the claims. Since such embodiments are deemed to be known to one of ordinary skill in the art, they may be excluded even if the exclusion is not set forth explicitly herein. Any particular embodiment of the compositions of the invention (e.g., any nucleic acid or protein encoded thereby; any method of production; any method of use; etc.) can be excluded from any one or more claims, for any reason, whether or not related to the existence of prior art.

[1080] All cited sources, for example, references, publications, databases, database entries, and art cited herein, are incorporated into this application by reference, even if not expressly stated in the citation. In case of conflicting statements of a cited source and the instant application, the statement in the instant application shall control.

### EXAMPLES

### Example 1

### Modified mRNA Production

[1081] Modified mRNAs according to the invention are made using standard laboratory methods and materials.

[1082] The open reading frame with various upstream or downstream regions ((3-globin, tags, etc.) is ordered from DNA2.0 (Menlo Park, Calif.) and typically contains a multiple cloning site with XbaI recognition. Upon receipt of the construct, it is reconstituted and transformed into chemically competent E. coli. For the present invention, NEB DH5-alpha Competent E. coli are used. A typical clone map is shown in FIG. 3. Transformations are performed according to NEB instructions using 100 ng of plasmid. The protocol is as follows:
[1083] 1. Thaw a tube of NEB 5-alpha Competent E. coli cells on ice for 10 minutes.
[1084] 2. Add 1-5 μl containing 1 pg-100 ng of plasmid DNA to the cell mixture. Carefully flick the tube 4-5 times to mix cells and DNA. Do not vortex.
[1085] 3. Place the mixture on ice for 30 minutes. Do not mix.
[1086] 4. Heat shock at 42° C. for exactly 30 seconds. Do not mix.
[1087] 5. Place on ice for 5 minutes. Do not mix.
[1088] 6. Pipette 950 μl of room temperature SOC into the mixture.
[1089] 7. Place at 37° C. for 60 minutes. Shake vigorously (250 rpm) or rotate.
[1090] 8. Warm selection plates to 37° C.
[1091] 9. Mix the cells thoroughly by flicking the tube and inverting.
[1092] 10. Spread 50-100 μl of each dilution onto a selection plate and incubate overnight at 37° C. Alternatively, incubate at 30° C. for 24-36 hours or 25° C. for 48 hours.

[1093] A single colony is then used to inoculate 5 ml of LB growth media using the appropriate antibiotic and then allowed to grow (250 RPM, 37° C.) for 5 hours. This is then used to inoculate a 200 ml culture medium and allowed to grow overnight under the same conditions.

[1094] To isolate the plasmid (up to 850 μg), a maxi prep is performed using the Invitrogen PureLink™ HiPure Maxiprep Kit (Carlsbad, Calif.), following the manufacturer's instructions.

[1095] In order to generate cDNA for In Vitro Transcription (IVT), the plasmid is first linearized using a restriction enzyme such as XbaI. A typical restriction digest with XbaI will comprise the following: Plasmid 1.0 μg; 10× Buffer 1.0 μl; XbaI 1.5 μl; dH₂0 Up to 10 μl; incubated at 37° C. for 1 hr. If performing at lab scale (<5 μg), the reaction is cleaned up using Invitrogen's PureLink™ PCR Micro Kit (Carlsbad, Calif.) per manufacturer's instructions. Larger scale purifications may need to be done with a product that has a larger load capacity such as Invitrogen's standard PureLink PCR Kit (Carlsbad, Calif.). Following the cleanup, the linearized vector is quantified using the NanoDrop and analyzed to confirm linearization using agarose gel electrophoresis.

[1096] As a non-limiting example, G-CSF may represent the polypeptide of interest. Sequences used in the steps outlined in Examples 1-5 are shown in Table 10. It should be noted that the start codon (ATG) has been underlined in each sequence of Table 10.

TABLE 10
G-CSF Sequences

| SEQ | |
|---|---|
| ID | |
| NO | Description |
| 4251 | cDNAsequence: |
| | ATGGCTGGACCTGCCACCCAGAGCCCCATGAAGCTGATGGCCCTGCAGCTGCT |
| | GCTGTGGCACAGTGCACTCTGGACAGTGCAGGAAGCCACCCCCCTGGGCCCTG |
| | CCAGCTCCCTGCCCCAGAGCTTCCTGCTCAAGTGCTTAGAGCAAGTGAGGAAG |
| | ATCCAGGGCGATGGCGCAGCGCTCCAGGAGAAGCTGTGTGCCACCTACAAGCT |
| | GTGCCACCCCGAGGAGCTGGTGCTGCTCGGACACTCTCTGGGCATCCCCTGGG |
| | CTCCCCTGAGCAGCTGCCCCAGCCAGGCCCTGCAGCTGGCAGGCTGCTTGAGC |
| | CAACTCCATAGCGGCCTTTTCCTCTACCAGGGGCTCCTGCAGGCCCTGGAAGGG |
| | ATCTCCCCCGAGTTGGGTCCCACCTTGGACACACTGCAGCTGGACGTCGCCGAC |
| | TTTGCCACCACCATCTGGCAGCAGATGGAAGAACTGGGAATGGCCCCTGCCCT |
| | GCAGCCCACCCAGGGTGCCATGCCGGCCTTCGCCTCTGCTTTCCAGCGCCGGGC |
| | AGGAGGGGTCCTGGTTGCCTCCCATCTGCAGAGCTTCCTGGAGGTGTCGTACCG |
| | CGTTCTACGCCACCTTGCCCAGCCCTGA |
| 4252 | cDNA having T7 polymerase site, AfeI and Xba restriction site: |
| | TAATACGACTCACTATA |
| | GGGAAATAAGAGAGAAAAGAAGAGTAAGAAGAAATATAAGAGCCACC |
| | ATGGCTGGACCTGCCACCCAGAGCCCCATGAAGCTGATGGCCCTGCAGCTGCT |
| | GCTGTGGCACAGTGCACTCTGGACAGTGCAGGAAGCCACCCCCCTGGGCCCTG |
| | CCAGCTCCCTGCCCCAGAGCTTCCTGCTCAAGTGCTTAGAGCAAGTGAGGAAG |
| | ATCCAGGGCGATGGCGCAGCGCTCCAGGAGAAGCTGTGTGCCACCTACAAGCT |
| | GTGCCACCCCGAGGAGCTGGTGCTGCTCGGACACTCTCTGGGCATCCCCTGGG |
| | CTCCCCTGAGCAGCTGCCCCAGCCAGGCCCTGCAGCTGGCAGGCTGCTTGAGC |
| | CAACTCCATAGCGGCCTTTTCCTCTACCAGGGGCTCCTGCAGGCCCTGGAAGGG |
| | ATCTCCCCCGAGTTGGGTCCCACCTTGGACACACTGCAGCTGGACGTCGCCGAC |
| | TTTGCCACCACCATCTGGCAGCAGATGGAAGAACTGGGAATGGCCCCTGCCCT |
| | GCAGCCCACCCAGGGTGCCATGCCGGCCTTCGCCTCTGCTTTCCAGCGCCGGGC |
| | AGGAGGGGTCCTGGTTGCCTCCCATCTGCAGAGCTTCCTGGAGGTGTCGTACCG |
| | CGTTCTACGCCACCTTGCCCAGCCCTGA |
| | AGCGCTGCCTTCTGCGGGGCTTGCCTTCTGGCCATGCCCTTCTTCTCTCCCTTGC |
| | ACCTGTACCTCTTGGTCTTTGAATAAAGCCTGAGTAGGAAGGCGGCCGCTCGA |
| | GCATGCATCTAGA |
| 4253 | Optimized sequence; containing T7 polymerase site, AfeI and |
| | Xba restriction site |
| | TAATACGACTCACTATA |
| | GGGAAATAAGAGAGAAAAGAAGAGTAAGAAGAAATATAAGAGCCACC |
| | ATGGCCGGTCCCGCGACCCAAAGCCCCATGAAACTTATGGCCCTGCAGTTGCT |
| | GCTTTGGCACTCGGCCCTCTGGACAGTCCAAGAAGCGACTCCTCTCGGACCTGC |
| | CTCATCGTTGCCGCAGTCATTCCTTTTGAAGTGTCTGGAGCAGGTGCGAAAGAT |
| | TCAGGGCGATGGAGCCGCACTCCAAGAGAAGCTCTGCGCGACATACAAACTTT |
| | GCCATCCCGAGGAGCTCGTACTGCTCGGGCACAGCTTGGGGATTCCCTGGGCT |
| | CCTCTCTCGTCCTGTCCGTCGCAGGCTTTGCAGTTGGCAGGGTGCCTTTCCCAG |
| | CTCCACTCCGGTTTGTTCTTGTATCAGGGACTGCTGCAAGCCCTTGAGGGAATC |
| | TCGCCAGAATTGGGCCCGACGCTGGACACGTTGCAGCTCGACGTGGCGGATTT |
| | CGCAACAACCATCTGGCAGCAGATGGAGGAACTGGGGATGGCACCCGCGCTGC |
| | AGCCCACGCAGGGGGCAATGCCGGCCTTTGCGTCCGCGTTTCAGCGCAGGGCG |
| | GGTGGAGTCCTCGTAGCGAGCCACCTTCAATCATTTTTGGAAGTCTCGTACCGG |
| | GTGCTGAGACATCTTGCGCAGCCGTGA |
| | AGCGCTGCCTTCTGCGGGGCTTGCCTTCTGGCCATGCCCTTCTTCTCTCCCTTGC |
| | ACCTGTACCTCTTGGTCTTTGAATAAAGCCTGAGTAGGAAGGCGGCCGCTCGA |
| | GCATGCATCTAGA |
| 4254 | mRNA sequence (transcribed) |
| | GGGAAAUAAGAGAGAAAAGAAGAGUAAGAAGAAAUAUAAGAGCCACC |
| | AUGGCCGGUCCCGCGACCCAAAGCCCCAUGAAACUUAUGGCCCUGCAGUUGC |
| | UGCUUUGGCACUCGGCCCUCUGGACAGUCCAAGAAGCGACUCCUCUCGGACC |
| | UGCCUCAUCGUUGCCGCAGUCAUUCCUUUUGAAGUGUCUGGAGCAGGUGCG |
| | AAAGAUUCAGGGCGAUGGAGCCGCACUCCAAGAGAAGCUCUGCGCGACAUA |
| | CAAACUUUGCCAUCCCGAGGAGCUCGUACUGCUCGGGCACAGCUUGGGGAUU |
| | CCCUGGGCUCCUCUCUCGUCCUGUCCGUCGCAGGCUUUGCAGUUGGCAGGGU |
| | GCCUUUCCCAGCUCCACUCCGGUUUGUUCUUGUAUCAGGGACUGCUGCAAGC |
| | CCUUGAGGGAAUCUCGCCAGAAUUGGGCCCGACGCUGGACACGUUGCAGCUC |
| | GACGUGGCGGAUUUCGCAACAACCAUCUGGCAGCAGAUGGAGGAACUGGGG |
| | AUGGCACCCGCGCUGCAGCCCACGCAGGGGGCAAUGCCGGCCUUUGCGUCCG |
| | CGUUUCAGCGCAGGGCGGGUGGAGUCCUCGUAGCGAGCCACCUUCAAUCAUU |
| | UUUGGAAGUCUCGUACCGGGUGCUGAGACAUCUUGCGCAGCCGUGA |
| | AGCGCUGCCUUCUGCGGGGCUUGCCUUCUGGCCAUGCCCUUCUUCUCUCCCU |
| | UGCACCUGUACCUCUUGGUCUUUGAAUAAAGCCUGAGUAGGAAG |

### Example 2

### PCR for cDNA Production

[1097] PCR procedures for the preparation of cDNA is performed using 2×KAPA HiFi™ HotStart ReadyMix by Kapa Biosystems (Woburn, Mass.). This system includes 2×KAPA ReadyMix 12.5 μl; Forward Primer (10 uM) 0.75 μl; Reverse Primer (10 uM)0.75 μl; Template cDNA 100 ng; and dH₂O diluted to 25.0 μl. The reaction conditions are at 95° C. for 5 min. and 25 cycles of 98° C. 20 sec, then 58° C. 15 sec, then 72° C. 45 sec, then 72° C. 5 min. then 4° C. to termination.

[1098] The reverse primer of the instant invention incorporates a poly-T₁₂₀ for a poly-A₁₂₀ in the mRNA. Other reverse primers with longer or shorter poly(T) tracts can be used to adjust the length of the poly(A) tail in the mRNA.

[1099] The reaction is cleaned up using Invitrogen's PureLink™ PCR Micro Kit (Carlsbad, Calif.) per manufacturer's instructions (up to 5 μg). Larger reactions will require a cleanup using a product with a larger capacity. Following the cleanup, the cDNA is quantified using the NanoDrop and analyzed by agarose gel electrophoresis to confirm the cDNA is the expected size. The cDNA is then submitted for sequencing analysis before proceeding to the in vitro transcription reaction.

### Example 3

### In Vitro Transcription

[1100] The in vitro transcription reaction generates mRNA containing modified nucleotides or modified RNA. The input nucleotide triphosphate (NTP) mix is made in-house using natural and un-natural NTPs.

[1101] A typical in vitro transcription reaction includes the following:
[1102] 2. Template cDNA1.0 μg
[1103] 3. 10× transcription buffer (400 mM Tris-HCl pH 8.0, 190 mM MgCl2, 50 mM DTT, 10 mM Spermidine)2.0 μl
[1104] 4. Custom NTPs (25 mM each) 7.2 μl
[1105] 5. RNase Inhibitor20 U
[1106] 6. T7 RNA polymerase 3000 U
[1107] 7. dH₂O Up to 20.0 μl. and
[1108] 8. Incubation at 37° C. for 3 hr-5 hrs.

[1109] The crude IVT mix may be stored at 4° C. overnight for cleanup the next day. 1 U of RNase-free DNase is then used to digest the original template. After 15 minutes of incubation at 37° C., the mRNA is purified using Ambion's MEGAclear™ Kit (Austin, Tex.) following the manufacturer's instructions. This kit can purify up to 500 μg of RNA. Following the cleanup, the RNA is quantified using the NanoDrop and analyzed by agarose gel electrophoresis to confirm the RNA is the proper size and that no degradation of the RNA has occurred.

### Example 4

### Enzymatic Capping of mRNA

[1110] Capping of the mRNA is performed as follows where the mixture includes: IVT RNA 60 μg-180 μg and dH₂O up to 72 μl. The mixture is incubated at 65° C. for 5 minutes to denature RNA, then transfer immediately to ice.

[1111] The protocol then involves the mixing of 10× Capping Buffer (0.5 M Tris-HCl (pH 8.0), 60 mM KCl, 12.5 mM MgCl2)(10.0 μl); 20 mM GTP (5.0 μl); 20 mM S-Adenosyl Methionine (2.5 μl); RNase Inhibitor (100 U); 2′-O-Methyltransferase (400 U); Vaccinia capping enzyme (Guanylyl transferase) (40 U); dH₂O (Up to 28 μl); and incubation at 37° C. for 30 minutes for 60 μg RNA or up to 2 hours for 180 μg of RNA.

[1112] The mRNA is then purified using Ambion's MEGAclear™ Kit (Austin, Tex.) following the manufacturer's instructions. Following the cleanup, the RNA is quantified using the NanoDrop (ThermoFisher, Waltham, Mass.) and analyzed by agarose gel electrophoresis to confirm the RNA is the proper size and that no degradation of the RNA has occurred. The RNA product may also be sequenced by running a reverse-transcription-PCR to generate the cDNA for sequencing.

### Example 5

### PolyA tailing reaction

[1113] Without a poly-T in the cDNA, a poly-A tailing reaction must be performed before cleaning the final product. This is done by mixing Capped IVT RNA (100 μl); RNase Inhibitor (20 U); 10× Tailing Buffer (0.5 M Tris-HCl (pH 8.0), 2.5 M NaCl, 100 mM MgCl2)(12.0 μl); 20 mM ATP (6.0 μl); Poly-A Polymerase (20 U); dH₂O up to 123.5 μl and incubation at 37° C. for 30 min. If the poly-A tail is already in the transcript, then the tailing reaction may be skipped and proceed directly to cleanup with Ambion's MEGAclear™ kit (up to 500 μg). Poly-A Polymerase is preferably a recombinant enzyme expressed in yeast.

[1114] For studies performed and described herein, the poly-A tail is encoded in the IVT template to comprise 160 nucleotides in length. However, it should be understood that the processivity or integrity of the polyA tailing reaction may not always result in exactly 160 nucleotides. Hence polyA tails of approximately 160 nucleotides, e.g, about 150-165, 155, 156, 157, 158, 159, 160, 161, 162, 163, 164 or 165 are within the scope of the invention.

### Example 6

### Natural 5′ Caps and 5′ Cap Analogues

[1115] 5′-capping of modified RNA may be completed concomitantly during the in vitro-transcription reaction using the following chemical RNA cap analogs to generate the 5′-guanosine cap structure according to manufacturer protocols: 3′-O-Me-m7G(5′)ppp(5′)G; G(5′)ppp(5′)A; G(5′)ppp(5′)G; m7G(5′)ppp(5′)A; m7G(5′)ppp(5′)G (New England BioLabs, Ipswich, Mass.). 5′-capping of modified RNA may be completed post-transcriptionally using a Vaccinia Virus Capping Enzyme to generate the “Cap 0” structure: m7G(5′)ppp(5′)G (New England BioLabs, Ipswich, Mass.). Cap 1 structure may be generated using both Vaccinia Virus Capping Enzyme and a 2′-O methyl-transferase to generate: m7G(5′)ppp(5′)G-2′-O-methyl. Cap 2 structure may be generated from the Cap 1 structure followed by the 2′-O-methylation of the 5′-antepenultimate nucleotide using a 2′-O methyl-transferase. Cap 3 structure may be generated from the Cap 2 structure followed by the 2′-O-methylation of the 5′-preantepenultimate nucleotide using a 2′-0 methyl-transferase. Enzymes are preferably derived from a recombinant source.

[1116] When transfected into mammalian cells, the modified mRNAs may have a stability of between 12-18 hours or more than 18 hours, e.g., 24, 36, 48, 60, 72 or greater than 72 hours.

### Example 7

### Chemical Cap Vs. Enzymatically-Derived Cap Protein Expression Assay

[1117] Synthetic mRNAs encoding human G-CSF containing the ARCA cap analog or the Cap1 structure can be transfected into human primary keratinocytes at equal concentrations. 6, 12, 24 and 36 hours post-transfection the amount of G-CSF secreted into the culture medium can be assayed by ELISA. Synthetic mRNAs that secrete higher levels of G-CSF into the medium would correspond to a synthetic mRNA with a higher translationally-competent Cap structure.

### Example 8

### Chemical Cap Vs. Enzymatically-Derived Cap Purity Analysis

[1118] Synthetic mRNAs encoding human G-CSF containing the ARCA cap analog or the Cap1 structure crude synthesis products can be compared for purity using denaturing Agarose-Urea gel electrophoresis or HPLC analysis. Synthetic mRNAs with a single, consolidated band by electrophoresis correspond to the higher purity product compared to a synthetic mRNA with multiple bands or streaking bands. Synthetic mRNAs with a single HPLC peak would also correspond to a higher purity product. The capping reaction with a higher efficiency would provide a more pure mRNA population.

### Example 9

### Chemical Cap Vs. Enzymatically-Derived Cap Cytokine Analysis

[1119] Synthetic mRNAs encoding human G-CSF containing the ARCA cap analog or the Cap1 structure can be transfected into human primary keratinocytes at multiple concentrations. 6, 12, 24 and 36 hours post-transfection the amount of pro-inflammatory cytokines such as TNF-alpha and IFN-beta secreted into the culture medium can be assayed by ELISA. Synthetic mRNAs that secrete higher levels of pro-inflammatory cytokines into the medium would correspond to a synthetic mRNA containing an immune-activating cap structure.

### Example 10

### Chemical Cap Vs. Enzymatically-Derived Cap Capping Reaction Efficiency

[1120] Synthetic mRNAs encoding human G-CSF containing the ARCA cap analog or the Cap1 structure can be analyzed for capping reaction efficiency by LC-MS after capped mRNA nuclease treatment. Nuclease treatment of capped mRNAs would yield a mixture of free nucleotides and the capped 5′-5-triphosphate cap structure detectable by LC-MS. The amount of capped product on the LC-MS spectra can be expressed as a percent of total mRNA from the reaction and would correspond to capping reaction efficiency. The Cap structure with a higher capping reaction efficiency would have a higher amount of capped product by LC-MS.

### Example 11

### Agarose Gel Electrophoresis of Modified RNA or RT PCR Products

[1121] Individual modRNAs (200-400 ng in a 20 μl volume) or reverse transcribed PCR products (200-400 ng) are loaded into a well on a non-denaturing 1.2% Agarose E-Gel (Invitrogen, Carlsbad, Calif.) and run for 12-15 minutes according to the manufacturer protocol.

### Example 12

### Nanodrop Modified RNA Quantification and UV Spectral Data

[1122] Modified RNAs in TE buffer (1 μl) are used for Nanodrop UV absorbance readings to quantitate the yield of each modified RNA from an in vitro transcription reaction.

### Example 13

### In Vitro Transcription of Modified RNA Containing Varying Poly-A Tail Lengths

[1123] Modified mRNAs were made using standard laboratory methods and materials for in vitro transcription with the exception that the nucleotide mix contains modified nucleotides. Modified mRNAs of the present example included 5-methycytosine and pseudouridine. The open reading frame (ORF) of the gene of interest is flanked by a 5′ untranslated region (UTR) containing a strong Kozak translational initiation signal and an alpha-globin 3′ UTR terminating with an oligo(dT) sequence for templated addition of a polyA tail for modified RNAs not incorporating Adenosine analogs. Adenosine-containing modRNAs are synthesized without an oligo (dT) sequence to allow for post-transcription poly (A) polymerase poly-(A) tailing. Poly-a tail lengths of 0 nts, 80 nts, 120 nts, 160 nts were generated for human G-CSF. G-CSF sequences include the cDNA sequence (SEQ ID NO: 4253), the mRNA sequence (SEQ ID NO: 4254) and the protein sequence (SEQ ID NO: 4255). Detection of G-CSF may be performed by the primer probe sets for cDNA including the forward primer TTG GAC CCT CGT ACA GAA GCT AAT ACG (SEQ ID NO: 4256), a reverse primer for template Poly(A) tailing T(₁₂₀)CT TCC TAC TCA GGC TTT ATT CAA AGA CCA (SEQ ID NO: 4257) and a reverse primer for post-transcriptional Poly(A) polymerase tailing CTT CCT ACT CAG GCT TTA TTC AAA GAC CA (SED ID NO: 4258). Detection may also be performed by G-CSF modified nucleic acid molecule reverse-transcriptase polymerase chain reaction (RT-PCR) forward primer TGG CCG GTC CCG CGA CCC AA (SEQ ID NO: 4259) and reverse primer GCT TCA CGG CTG CGC AAG AT (SEQ ID NO: 4260).

[1124] Synthesized reverse primers were designed and ordered from IDT. The reverse primers incorporate a poly-T40, poly-T80, poly-T120, poly-T160 for a poly-A40, poly-A80, poly-A120, and poly-A160 respectively. The Human Embryonic Kidney (HEK) 293 were grown in Eagles' Minimal Essential Medium (EMEM) and 10% Fetal Bovine Serum (FBS) until they reached a confluence of 80-90%. Approximately 80,000 cells were transfected with 100 ng and 500 ng of modified RNA complexed with RNAiMax from Invitrogen (Carlsbad, Calif.) in a 24-well plate. The RNA:RNAiMax complex was formed by first incubating the RNAiMax with EMEM in a 5× volumetric dilution for 10 minutes at room temperature.

[1125] The RNA vial was then mixed with the RNAiMAX vial and incubated for 20-30 at room temperature before being added to the cells in a drop-wise fashion. Recombinant Human G-CSF was added at 2 ng/mL to the control cell culture wells. The concentration of secreted Human G-CSF was measured at 12 hours post-transfection. FIG. 4 shows the histogram for the Enzyme-linked immunosorbent assay (ELISA) for Human G-CSF from HEK293 cells transfected with human G-CSF modified RNA that had varying poly-A tail lengths: 0 nts, 80 nts, 120 nts, 160 nts. We observed increased protein expression with the 160 nts poly-A tail.

[1126] From the data it can be determined that longer poly-A tails produce more protein and that this activity is dose dependent.

### Example 14

### Expression of Modified Nucleic Acid with microRNA Binding Site

[1127] Human embryonic kidney epithelial cells (HEK293A) and primary human hepatocytes (Hepatocytes) were seeded at a density of 200,000 per well in 500 ul cell culture medium (InVitro GRO medium from Celsis, Chicago, Ill.). G-CSF mRNA having an alpha-globin 3′UTR (G-CSF alpha) (cDNA sequence shown in SEQ ID NO: 4261; mRNA sequence is shown in SEQ ID NO: 4262; polyA tail of approximately 160 nucleotides not shown in sequence; 5′Cap, Cap1; fully modified with 5-methylcytosine and pseudouridine) G-CSF mRNA having an alpha-globin 3′UTR and a miR-122 binding site (G-CSF miR-122) (cDNA sequence shown in SEQ ID NO: 4263; mRNA sequence is shown in SEQ ID NO: 4264; polyA tail of approximately 160 nucleotides not shown in sequence; 5′Cap, Cap1; fully modified with 5-methylcytosine and pseudouridine) or G-CSF mRNA having an alpha-globin 3′UTR with four miR-122 binding sites with the seed deleted (G-CSF no seed) (cDNA sequence shown in SEQ ID NO: 4265; mRNA sequence is shown in SEQ ID NO: 4266; polyA tail of approximately 160 nucleotides not shown in sequence; 5′Cap, Cap1; fully modified with 5-methylcytosine and pseudouridine) was tested at a concentration of 250 ng per well in 24 well plates. The expression of G-CSF was measured by ELISA and the results are shown in Table 11.

TABLE 11
miR-122 Binding Sites

| | HEK293A | Hepatocytes |
|---|---|---|
| | Protein | Protein |
| | Expression | Expression |
| | (ng/mL) | (ng/mL) |
| G-CSF alpha | 99.85 | 8.18 |
| G-CSF miR-122 | 87.67 | 0 |
| G-CSF no seed | 200.2 | 8.05 |

[1128] Since HEK293 cells do not express miR-122 there was no down-regulation of G-CSF protein from the sequence containing miR-122. Whereas, the human hepatocytes express high levels of miR-122 and there was a drastic down-regulation of G-CSF protein observed when the G-CSF sequence contained the miR-122 target sequence. Consequently, the mRNA functioned as an auxotrophic mRNA.

### Example 15

### Directed SAR of Pseudouridine and N1-Methyl PseudoUridine

[1129] With the recent focus on the pyrimidine nucleoside pseudouridine, a series of structure-activity studies were designed to investigate mRNA containing modifications to pseudouridine or N1-methyl-pseudourdine.

[1130] The study was designed to explore the effect of chain length, increased lipophilicity, presence of ring structures, and alteration of hydrophobic or hydrophilic interactions when modifications were made at the N1 position, C6 position, the 2-position, the 4-position and on the phosphate backbone. Stability is also investigated.

[1131] To this end, modifications involving alkylation, cycloalkylation, alkyl-cycloalkylation, arylation, alkyl-arylation, alkylation moieties with amino groups, alkylation moieties with carboxylic acid groups, and alkylation moieties containing amino acid charged moieties are investigated. The degree of alkylation is generally C₁-C₆. Examples of the chemistry modifications include those listed in Table 12 and 13.

TABLE 12
Pseudouridine and N1-methyl Pseudo Uridine SAR

| | Compound | Naturally |
|---|---|---|
| Chemistry Modification | # | occuring |
| N1-Modifications | | |
| N1-Ethyl-pseudo-UTP | 1 | N |
| N1-Propyl-pseudo-UTP | 2 | N |
| N1-iso-propyl-pseudo-UTP | 3 | N |
| N1-(2,2,2-Trifluoroethyl)-pseudo-UTP | 4 | N |
| N1-Cyclopropyl-pseudo-UTP | 5 | N |
| N1-Cyclopropylmethyl-pseudo-UTP | 6 | N |
| N1-Phenyl-pseudo-UTP | 7 | N |
| N1-Benzyl-pseudo-UTP | 8 | N |
| N1-Aminomethyl-pseudo-UTP | 9 | N |
| Pseudo-UTP-N1-2-ethanoic acid | 10 | N |
| N1-(3-Amino-3-carboxypropyl)pseudo-UTP | 11 | N |
| N1-Methyl-3-(3-amino-3-carboxy- | 12 | Y |
| propyl)pseudo-UTP | | |
| C-6 Modifications | | |
| 6-Methyl-pseudo-UTP | 13 | N |
| 6-Trifluoromethyl-pseudo-UTP | 14 | N |
| 6-Methoxy-pseudo-UTP | 15 | N |
| 6-Phenyl-pseudo-UTP | 16 | N |
| 6-Iodo-pseudo-UTP | 17 | N |
| 6-Bromo-pseudo-UTP | 18 | N |
| 6-Chloro-pseudo-UTP | 19 | N |
| 6-Fluoro-pseudo-UTP | 20 | N |
| 2- or 4-position Modifications | | |
| 4-Thio-pseudo-UTP | 21 | N |
| 2-Thio-pseudo-UTP | 22 | N |
| Phosphate backbone Modifications | | |
| Alpha-thio-pseudo-UTP | 23 | N |
| N1-Me-alpha-thio-pseudo-UTP | 24 | N |

TABLE 13
Pseudouridine and N1-methyl Pseudo Uridine SAR

| | Compound | Naturally |
|---|---|---|
| Chemistry Modification | # | occurring |
| N1-Methyl-pseudo-UTP | 1 | Y |
| N1-Butyl-pseudo-UTP | 2 | N |
| N1-tert-Butyl-pseudo-UTP | 3 | N |
| N1-Pentyl-pseudo-UTP | 4 | N |
| N1-Hexyl-pseudo-UTP | 5 | N |
| N1-Trifluoromethyl-pseudo-UTP | 6 | Y |
| N1-Cyclobutyl-pseudo-UTP | 7 | N |
| N1-Cyclopentyl-pseudo-UTP | 8 | N |
| N1-Cyclohexyl-pseudo-UTP | 9 | N |
| N1-Cycloheptyl-pseudo-UTP | 10 | N |
| N1-Cyclooctyl-pseudo-UTP | 11 | N |
| N1-Cyclobutylmethyl-pseudo-UTP | 12 | N |
| N1-Cyclopentylmethyl-pseudo-UTP | 13 | N |
| N1-Cyclohexylmethyl-pseudo-UTP | 14 | N |
| N1-Cycloheptylmethyl-pseudo-UTP | 15 | N |
| N1-Cyclooctylmethyl-pseudo-UTP | 16 | N |
| N1-p-tolyl-pseudo-UTP | 17 | N |
| N1-(2,4,6-Trimethyl-phenyl)pseudo-UTP | 18 | N |
| N1-(4-Methoxy-phenyl)pseudo-UTP | 19 | N |
| N1-(4-Amino-phenyl)pseudo-UTP | 20 | N |
| N1(4-Nitro-phenyl)pseudo-UTP | 21 | N |
| Pseudo-UTP-N1-p-benzoic acid | 22 | N |
| N1-(4-Methyl-benzyl)pseudo-UTP | 24 | N |
| N1-(2,4,6-Trimethyl-benzyl)pseudo-UTP | 23 | N |
| N1-(4-Methoxy-benzyl)pseudo-UTP | 25 | N |
| N1-(4-Amino-benzyl)pseudo-UTP | 26 | N |
| N1-(4-Nitro-benzyl)pseudo-UTP | 27 | N |
| Pseudo-UTP-N1-methyl-p-benzoic acid | 28 | N |
| N1-(2-Amino-ethyl)pseudo-UTP | 29 | N |
| N1-(3-Amino-propyl)pseudo-UTP | 30 | N |
| N1-(4-Amino-butyl)pseudo-UTP | 31 | N |
| N1-(5-Amino-pentyl)pseudo-UTP | 32 | N |
| N1-(6-Amino-hexyl)pseudo-UTP | 33 | N |
| Pseudo-UTP-N1-3-propionic acid | 34 | N |
| Pseudo-UTP-N1-4-butanoic acid | 35 | N |
| Pseudo-UTP-N1-5-pentanoic acid | 36 | N |
| Pseudo-UTP-N1-6-hexanoic acid | 37 | N |
| Pseudo-UTP-N1-7-heptanoic acid | 38 | N |
| N1-(2-Amino-2-carboxyethyl)pseudo-UTP | 39 | N |
| N1-(4-Amino-4-carboxybutyl)pseudo-UTP | 40 | N |
| N3-Alkyl-pseudo-UTP | 41 | N |
| 6-Ethyl-pseudo-UTP | 42 | N |
| 6-Propyl-pseudo-UTP | 43 | N |
| 6-iso-Propyl-pseudo-UTP | 44 | N |
| 6-Butyl-pseudo-UTP | 45 | N |
| 6-tert-Butyl-pseudo-UTP | 46 | N |
| 6-(2,2,2-Trifluoroethyl)-pseudo-UTP | 47 | N |
| 6-Ethoxy-pseudo-UTP | 48 | N |
| 6-Trifluoromethoxy-pseudo-UTP | 49 | N |
| 6-Phenyl-pseudo-UTP | 50 | N |
| 6-(Substituted-Phenyl)-pseudo-UTP | 51 | N |
| 6-Cyano-pseudo-UTP | 52 | N |
| 6-Azido-pseudo-UTP | 53 | N |
| 6-Amino-pseudo-UTP | 54 | N |
| 6-Ethylcarboxylate-pseudo-UTP | 54b | N |
| 6-Hydroxy-pseudo-UTP | 55 | N |
| 6-Methylamino-pseudo-UTP | 55b | N |
| 6-Dimethylamino-pseudo-UTP | 57 | N |
| 6-Hydroxyamino-pseudo-UTP | 59 | N |
| 6-Formyl-pseudo-UTP | 60 | N |
| 6-(4-Morpholino)-pseudo-UTP | 61 | N |
| 6-(4-Thiomorpholino)-pseudo-UTP | 62 | N |
| N1-Me-4-thio-pseudo-UTP | 63 | N |
| N1-Me-2-thio-pseudo-UTP | 64 | N |
| 1,6-Dimethyl-pseudo-UTP | 65 | N |
| 1-Methyl-6-trifluoromethyl-pseudo-UTP | 66 | N |
| 1-Methyl-6-ethyl-pseudo-UTP | 67 | N |
| 1-Methyl-6-propyl-pseudo-UTP | 68 | N |
| 1-Methyl-6-iso-propyl-pseudo-UTP | 69 | N |
| 1-Methyl-6-butyl-pseudo-UTP | 70 | N |
| 1-Methyl-6-tert-butyl-pseudo-UTP | 71 | N |
| 1-Methyl-6-(2,2,2-Trifluoroethyl)pseudo-UTP | 72 | N |
| 1-Methyl-6-iodo-pseudo-UTP | 73 | N |
| 1-Methyl-6-bromo-pseudo-UTP | 74 | N |
| 1-Methyl-6-chloro-pseudo-UTP | 75 | N |
| 1-Methyl-6-fluoro-pseudo-UTP | 76 | N |
| 1-Methyl-6-methoxy-pseudo-UTP | 77 | N |
| 1-Methyl-6-ethoxy-pseudo-UTP | 78 | N |
| 1-Methyl-6-trifluoromethoxy-pseudo-UTP | 79 | N |
| 1-Methyl-6-phenyl-pseudo-UTP | 80 | N |
| 1-Methyl-6-(substituted phenyl)pseudo-UTP | 81 | N |
| 1-Methyl-6-cyano-pseudo-UTP | 82 | N |
| 1-Methyl-6-azido-pseudo-UTP | 83 | N |
| 1-Methyl-6-amino-pseudo-UTP | 84 | N |
| 1-Methyl-6-ethylcarboxylate-pseudo-UTP | 85 | N |
| 1-Methyl-6-hydroxy-pseudo-UTP | 86 | N |
| 1-Methyl-6-methylamino-pseudo-UTP | 87 | N |
| 1-Methyl-6-dimethylamino-pseudo-UTP | 88 | N |
| 1-Methyl-6-hydroxyamino-pseudo-UTP | 89 | N |
| 1-Methyl-6-formyl-pseudo-UTP | 90 | N |
| 1-Methyl-6-(4-morpholino)-pseudo-UTP | 91 | N |
| 1-Methyl-6-(4-thiomorpholino)-pseudo-UTP | 92 | N |
| 1-Alkyl-6-vinyl-pseudo-UTP | 93 | N |
| 1-Alkyl-6-allyl-pseudo-UTP | 94 | N |
| 1-Alkyl-6-homoallyl-pseudo-UTP | 95 | N |
| 1-Alkyl-6-ethynyl-pseudo-UTP | 96 | N |
| 1-Alkyl-6-(2-propynyl)-pseudo-UTP | 97 | N |
| 1-Alkyl-6-(1-propynyl)-pseudo-UTP | 98 | N |

### Example 16

### Incorporation of Naturally and Non-Naturally Occuring Nucleosides

[1132] Naturally and non-naturally occurring nucleosides are incorporated into mRNA encoding a polypeptide of interest. Examples of these are given in Tables 14 and 15. Certain commercially available nucleoside triphosphates (NTPs) are investigated in the polynucleotides of the invention. A selection of these are given in Table 14. The resultant mRNA are then examined for their ability to produce protein, induce cytokines, and/or produce a therapeutic outcome.

TABLE 14
Naturally and non-naturally occurring nucleosides

| | Compound | Naturally |
|---|---|---|
| Chemistry Modification | # | occuring |
| N4-Methyl-Cytosine | 1 | Y |
| N4,N4-Dimethyl-2′-OMe-Cytosine | 2 | Y |
| 5-Oxyacetic acid-methyl ester-Uridine | 3 | Y |
| N3-Methyl-pseudo-Uridine | 4 | Y |
| 5-Hydroxymethyl-Cytosine | 5 | Y |
| 5-Trifluoromethyl-Cytosine | 6 | N |
| 5-Trifluoromethyl-Uridine | 7 | N |
| 5-Methyl-amino-methyl-Uridine | 8 | Y |
| 5-Carboxy-methyl-amino-methyl-Uridine | 9 | Y |
| 5-Carboxymethylaminomethyl-2′-OMe-Uridine | 10 | Y |
| 5-Carboxymethylaminomethyl-2-thio-Uridine | 11 | Y |
| 5-Methylaminomethyl-2-thio-Uridine | 12 | Y |
| 5-Methoxy-carbonyl-methyl-Uridine | 13 | Y |
| 5-Methoxy-carbonyl-methyl-2′-OMe-Uridine | 14 | Y |
| 5-Oxyacetic acid-Uridine | 15 | Y |
| 3-(3-Amino-3-carboxypropyl)-Uridine | 16 | Y |
| 5-(carboxyhydroxymethyl)uridine methyl ester | 17 | Y |
| 5-(carboxyhydroxymethyl)uridine | 18 | Y |

TABLE 15
Non-naturally occurring nucleoside triphosphates

| | Compound | Naturally |
|---|---|---|
| Chemistry Modification | # | occuring |
| N1-Me-GTP | 1 | N |
| 2′-OMe-2-Amino-ATP | 2 | N |
| 2′-OMe-pseudo-UTP | 3 | Y |
| 2′-OMe-6-Me-UTP | 4 | N |
| 2′-Azido-2′-deoxy-ATP | 5 | N |
| 2′-Azido-2′-deoxy-GTP | 6 | N |
| 2′-Azido-2′-deoxy-UTP | 7 | N |
| 2′-Azido-2′-deoxy-CTP | 8 | N |
| 2′-Amino-2′-deoxy-ATP | 9 | N |
| 2′-Amino-2′-deoxy-GTP | 10 | N |
| 2′-Amino-2′-deoxy-UTP | 11 | N |
| 2′-Amino-2′-deoxy-CTP | 12 | N |
| 2-Amino-ATP | 13 | N |
| 8-Aza-ATP | 14 | N |
| Xanthosine-5′-TP | 15 | N |
| 5-Bromo-CTP | 16 | N |
| 2′-F-5-Methyl-2′-deoxy-UTP | 17 | N |
| 5-Aminoallyl-CTP | 18 | N |
| 2-Amino-riboside-TP | 19 | N |

### Example 17

### Incorporation of Modifications to the Nucleobase and Carbohydrate (Sugar)

[1133] Naturally and non-naturally occurring nucleosides are incorporated into mRNA encoding a polypeptide of interest. Commercially available nucleosides and NTPs having modifications to both the nucleobase and carbohydrate (sugar) are examined for their ability to be incorporated into mRNA and to produce protein, induce cytokines, and/or produce a therapeutic outcome. Examples of these nucleosides are given in Tables 16 and 17.

TABLE 16
Combination modifications

| Chemistry Modification | Compound # |
|---|---|
| 5-iodo-2′-fluoro-deoxyuridine | 1 |
| 5-iodo-cytidine | 6 |
| 2′-bromo-deoxyuridine | 7 |
| 8-bromo-adenosine | 8 |
| 8-bromo-guanosine | 9 |
| 2,2′-anhydro-cytidine hydrochloride | 10 |
| 2,2′-anhydro-uridine | 11 |
| 2′-Azido-deoxyuridine | 12 |
| 2-amino-adenosine | 13 |
| N4-Benzoyl-cytidine | 14 |
| N4-Amino-cytidine | 15 |
| 2′-O-Methyl-N4-Acetyl-cytidine | 16 |
| 2′Fluoro-N4-Acetyl-cytidine | 17 |
| 2′Fluor-N4-Bz-cytidine | 18 |
| 2′O-methyl-N4-Bz-cytidine | 19 |
| 2′O-methyl-N6-Bz-deoxyadenosine | 20 |
| 2′Fluoro-N6-Bz-deoxyadenosine | 21 |
| N2-isobutyl-guanosine | 22 |
| 2′Fluro-N2-isobutyl-guanosine | 23 |
| 2′O-methyl-N2-isobutyl-guanosine | 24 |

TABLE 17
Naturally occuring combinations

| | Compound | Naturally |
|---|---|---|
| Name | # | occurring |
| 5-Methoxycarbonylmethyl-2-thiouridine TP | 1 | Y |
| 5-Methylaminomethyl-2-thiouridine TP | 2 | Y |
| 5-Crbamoylmethyluridine TP | 3 | Y |
| 5-Carbamoylmethyl-2′-O-methyluridine TP | 4 | Y |
| 1-Methyl-3-(3-amino-3-carboxypropyl) | 5 | Y |
| pseudouridine TP | | |
| 5-Methylaminomethyl-2-selenouridine TP | 6 | Y |
| 5-Carboxymethyluridine TP | 7 | Y |
| 5-Methyldihydrouridine TP | 8 | Y |
| lysidine TP | 9 | Y |
| 5-Taurinomethyluridine TP | 10 | Y |
| 5-Taurinomethyl-2-thiouridine TP | 11 | Y |
| 5-(iso-Pentenylaminomethyl)uridine TP | 12 | Y |
| 5-(iso-Pentenylaminomethyl)-2-thiouridine TP | 13 | Y |
| 5-(iso-Pentenylaminomethyl)-2′-O- | 14 | Y |
| methyluridine TP | | |
| N4-Acetyl-2′-O-methylcytidine TP | 15 | Y |
| N4,2′-O-Dimethylcytidine TP | 16 | Y |
| 5-Formyl-2′-O-methylcytidine TP | 17 | Y |
| 2′-O-Methylpseudouridine TP | 18 | Y |
| 2-Thio-2′-O-methyluridine TP | 19 | Y |
| 3,2′-O-Dimethyluridine TP | 20 | Y |

[1134] In the tables “UTP” stands for uridine triphosphate, “GTP” stands for guanosine triphosphate, “ATP” stands for adenosine triphosphate, “CTP” stands for cytosine triphosphate, “TP” stands for triphosphate and “Bz” stands for benzyl.

### Example 18

### Signal Sequence Exchange Study

[1135] Several variants of mmRNAs encoding human Granulocyte colony stimulating factor (G-CSF) (mRNA sequence shown in SEQ ID NO: 4254; polyA tail of approximately 160 nucleotides not shown in sequence; 5′cap, Cap1) were synthesized using modified nucleotides pseudouridine and 5-methylcytosine (pseudo-U/5 mC). These variants included the G-CSF constructs encoding either the wild-type N terminal secretory signal peptide sequence (MAGPATQSPMKLMALQLLLWHSALWTVQEA; SEQ ID NO: 4267), no secretory signal peptide sequence, or secretory signal peptide sequences taken from other mRNAs. These included sequences where the wild type GCSF signal peptide sequence was replaced with the signal peptide sequence of either: human α-1-anti trypsin (AAT) (MMPSSVSWGILLLAGLCCLVPVSLA; SEQ ID NO: 4268), human Factor IX (FIX) (MQRVNMIMAESPSLITICLLGYLLSAECTVFLDHENANKILNRPKR; SEQ ID NO: 4269), human Prolactin (Prolac) (MKGSLLLLLVSNLLLCQSVAP; SEQ ID NO: 4270), or human Albumin (Alb) (MKWVTFISLLFLFSSAYSRGVFRR; SEQ ID NO: 4271).

[1136] 250 ng of modified mRNA encoding each G-CSF variant was transfected into HEK293A (293A in the table), mouse myoblast (MM in the table) (C2C12, CRL-1772, ATCC) and rat myoblast (RM in the table) (L6 line, CRL-1458, ATCC) cell lines in a 24 well plate using 1 ul of Lipofectamine 2000 (Life Technologies), each well containing 300,000 cells. The supernatants were harvested after 24 hrs and the secreted G-CSF protein was analyzed by ELISA using the Human G-CSF ELISA kit (Life Technologies). The data shown in Table 18 reveal that cells transfected with G-CSF mmRNA encoding the Albumin signal peptide secrete at least 12 fold more G-CSF protein than its wild type counterpart.

TABLE 18
Signal Peptide Exchange

| | 293A | MM | RM |
|---|---|---|---|
| Signal peptides | (pg/ml) | (pg/ml) | (pg/ml) |
| G-CSF Natural | 9650 | 3450 | 6050 |
| α-1-anti trypsin | 9950 | 5000 | 8475 |
| Factor IX | 11675 | 6175 | 11675 |
| Prolactin | 7875 | 1525 | 9800 |
| Albumin | 122050 | 81050 | 173300 |
| No Signal peptide | 0 | 0 | 0 |

### Example 19

### 3′ Untranslated Regions

[1137] A 3′ UTR may be provided as a flanking region. Multiple 3′ UTRs may be included in the flanking region and may be the same or of different sequences. Any portion of the flanking regions, including none, may be codon optimized and any may independently contain one or more different structural or chemical modifications, before and/or after codon optimization.

[1138] Shown in Table 3 and 19 is a listing of 3′-untranslated regions of the invention. Variants of 3′ UTRs may be utilized wherein one or more nucleotides are added or removed to the termini, including A, T, C or G.

TABLE 19
3′-Untranslated Regions

| 3′ UTR | Name/ | | SEQ |
|---|---|---|---|
| Identi- | Descrip- | | ID |
| fier | tion | Sequence | NO. |
| 3UTR- | α-globin | GCTGGAGCCTCGGTGGCCATGCTTCTTGCC | 4272 |
| 017 | | CCTTGGGCCTCCCCCCAGCCCCTCCTCCCC | |
| | | TTCCTGCACCCGTACCCCCGTGGTCTTTGA | |
| | | ATAAAGTCTGAGTGGGCGGC | |

### Example 20

### Alteration of Polynucleotide Trafficking: NLS and NES

[1139] Two nuclear export signals (NES) which may be incorporated into the polynucleotides of the present invention includes those reported by Muller, et al (Traffic, 2009, 10: 514-527) and are associated with signaling via the gene COMMD1. These are NEST, PVAIIELEL (SEQ ID NO 4273) and NES2, VNQILKTLSE (SEQ ID NO 4274).

[1140] Nuclear localization signals may also be used. One such sequence is PKKKRKV (SEQ ID NO: 4275).

[1141] Cell lines or mice are administered one or more polynucleotides having a NLS or NES encoded therein. Upon administration the polynucleotide is trafficked to an alternate location, e.g., into the nucleus using the NLS. The polypeptide having the NLS would be trafficked to the nucleus where it would deliver either a survival or death signal to the nuclear microenvironment. Polypeptides which may be localized to the nucleus include those with altered binding properties for DNA which will function to alter the expression profile of the cell in a therapeutically beneficial manner for the cell, tissue or organism.

[1142] In one experiment, the polynucleotide encodes a COMMD1 mut1/mut 2+NLS (e.g., both NES signals disrupted plus a NLS added) following the methods of Muller et al, (Traffic 2009; 10: 514-527) and van de Sluis et al, (J Clin Invest. 2010; 120 (6):2119-2130). The signal sequence may encode a polypeptide or a scrambled sequence which is not translatable. The signal sequence encoded would interact with HIF1-alpha to alter the transcritome of the cancer cells.

[1143] The experiment is repeated under normal and hypoxic conditions.

[1144] Once identified the HIF1-alpha dependent polynucleotide is tested in cancer cell lines clonal survival or a marker of apoptosis is measured and compared to control or mock treated cells.

### Example 21

### miRNA Binding Sites (BS) Useful as Sensor Sequences in Polynucleotides

[1145] miRNA-binding sites are used in the 3′UTR of mRNA therapeutics to direct cytotoxic or cytoprotective mRNA therapeutics to specific cells (normal and/or cancerous).

[1146] A strong apoptotic signal (i.e., AIFsh—Apoptosis Inducing Factor short isoform) is encoded as the polypeptide or “signal” and is encoded along with a series of 3′UTR miR binding sites, such as that for mir-122a, that would make the polynucleotide relatively much more stable in cancerous cells than in normal cells.

[1147] Experiments comparing cancer vs. normal heaptic cell lines where the cancer cell lines have a specific miR signature are performed in vitro. SNU449 or HEP3B (human derived HCC cell lines) are used because both have been shown to have “undetectable miR-122a”, whereas normal hepatocytes should have very high miR-122a levels. First a cancer cell is selected which is sensitive to AIFsh polynucleotide (i.e., it results in apoptosis).

[1148] Three miR-122a binding sites are encoded into the 3′UTR of an mRNA sequence for AIFsh and the study arms include 2 cell lines (normal hepatocyte, SNU449 or HEP3B)×5 treatments (vehicle alone, polynucleotide untranslatabe, polynucleotide AIFsh (no miR BS in 3′UTR), 3′UTR[miR122a BS ×3]-polynucleotide untranslatable, 3′UTR[miR122a BS ×3]-polynucleotide AIFsh).

[1149] The expected result would be significant apoptosis in the face of polynucleotide AIFsh in both normal and cancer (HEP3B or SNU449) cell lines in the absence of any 3′UTR-miR122a BS. However, a significant difference in the relative apoptosis of normal vs. cancer cell lines in the face of 3′UTR [miR122a BS ×3]-polynucleotide AIFsh.

[1150] Reversibility of the effect is shown with the co-administration of miR122a to the cancer cell line (e.g., through some transduction of the miR122a activity back into the cancer cell line).

[1151] In vivo animal studies are then performed using any of the models disclosed herein or a commercially available orthotopic HCC model.

### Example 22

### Cell Lines for the Study of Polynucleotides

[1152] Polynucleotides of the present invention and formulations comprising the polynucleotides of the present invention or described in International application No PCT/US2012/69610, herein incorporated by reference in its entirety, may be investigated in any number of cancer or normal cell lines. Cell lines useful in the present invention include those from ATCC (Manassas, Va.) and are listed in Table 20.

TABLE 20
Cell lines

| ATCC | | |
|---|---|---|
| Number | Hybridoma or Cell line Description | Name |
| CCL-171 | Homo sapiens (human) Source: Organ: lung | MRC-5 |
| | Disease: normal | |
| | Cell Type: fibroblast | |
| CCL-185 | Homo sapiens (human) Source: Organ: lung | A549 |
| | Disease: carcinoma | |
| CCL-248 | Homo sapiens (human) Source: Organ: colon | T84 |
| | Disease: colorectal carcinoma | |
| | Derived from metastatic site: lung | |
| CCL-256 | Homo sapiens (human) Source: Organ: lung | NCI-H2126 |
| | Disease: adenocarcinoma; non-small cell lung cancer | [H2126] |
| | Derived from metastatic site: pleural effusion | |
| CCL-257 | Homo sapiens (human) Source: Organ: lung | NCI-H1688 |
| | Disease: carcinoma; classic small cell lung cancer | [H1688] |
| CCL-75 | Homo sapiens (human) Source: Organ: lung | WI-38 |
| | Disease: normal | |
| | Cell Type: fibroblast | |
| CCL-75.1 | Homo sapiens (human) Source: Organ: lung | WI-38 VA-13 |
| | Cell Type: fibroblastSV40 transformed | subline 2RA |
| CCL-95.1 | Homo sapiens (human) Source: Organ: lung | WI-26 VA4 |
| | Cell Type: SV40 transformed | |
| CRL-10741 | Homo sapiens (human) Source: Organ: liver | C3A [HepG2/C3A, |
| | Disease: hepatocellular carcinoma | derivative of Hep |
| | | G2 (ATCC HB- |
| | | 8065)] |
| CRL-11233 | Homo sapiens (human) Source: Organ: liver | THLE-3 |
| | Tissue: left lobe | |
| | Cell Type: epithelialimmortalized with SV40 large T | |
| | antigen | |
| CRL-11351 | Homo sapiens (human) Source: Organ: lung | H69AR |
| | Disease: carcinoma; small cell lung cancer; multidrug | |
| | resistant | |
| | Cell Type: epithelial | |
| CRL-1848 | Homo sapiens (human) Source: Organ: lung | NCI-H292 [H292] |
| | Disease: mucoepidermoid pulmonary carcinoma | |
| CRL-1918 | Homo sapiens (human) Source: Organ: pancreas | CFPAC-1 |
| | Disease: ductal adenocarcinoma; cystic fibrosis | |
| | Derived from metastatic site: liver metastasis | |
| CRL-1973 | Homo sapiens (human) Source: Organ: testis | NTERA-2 cl.D1 |
| | Disease: malignant pluripotent embryonal carcinoma | [NT2/D1] |
| | Derived from metastatic site: lung | |
| CRL-2049 | Homo sapiens (human) Source: Organ: lung | DMS 79 |
| | Disease: carcinoma; small cell lung cancer | |
| CRL-2062 | Homo sapiens (human) Source: Organ: lung | DMS 53 |
| | Disease: carcinoma; small cell lung cancer | |
| CRL-2064 | Homo sapiens (human) Source: Organ: lung | DMS 153 |
| | Disease: carcinoma; small cell lung cancer | |
| | Derived from metastatic site: liver | |
| CRL-2066 | Homo sapiens (human) Source: Organ: lung | DMS 114 |
| | Disease: carcinoma; small cell lung cancer | |
| CRL-2081 | Homo sapiens (human) Source: Disease: biphasic | MSTO-211H |
| | mesothelioma | |
| | Derived from metastatic site: lung | |
| CRL-2170 | Homo sapiens (human) Source: Organ: lung | SW 1573 [SW- |
| | Disease: alveolar cell carcinoma | 1573, SW1573] |
| CRL-2177 | Homo sapiens (human) Source: Organ: lung | SW 1271 [SW- |
| | Disease: carcinoma; small cell lung cancer | 1271, SW1271] |
| CRL-2195 | Homo sapiens (human) Source: Organ: lung | SHP-77 |
| | Disease: carcinoma; small cell lung cancer | |
| | Cell Type: large cell, variant; | |
| CRL-2233 | Homo sapiens (human) Source: Organ: liver | SNU-398 |
| | Disease: hepatocellular carcinoma | |
| CRL-2234 | Homo sapiens (human) Source: Organ: liver | SNU-449 |
| | Tumor Stage: grade II-III/IV | |
| | Disease: hepatocellular carcinoma | |
| CRL-2235 | Homo sapiens (human) Source: Organ: liver | SNU-182 |
| | Tumor Stage: grade III/IV | |
| | Disease: hepatocellular carcinoma | |
| CRL-2236 | Homo sapiens (human) Source: Organ: liver | SNU-475 |
| | Tumor Stage: grade II-IV/V | |
| | Disease: hepatocellular carcinoma | |
| CRL-2237 | Homo sapiens (human) Source: Organ: liver | SNU-387 |
| | Tumor Stage: grade IV/V | |
| | Disease: pleomorphic hepatocellular carcinoma | |
| CRL-2238 | Homo sapiens (human) Source: Organ: liver | SNU-423 |
| | Tumor Stage: grade III/IV | |
| | Disease: pleomorphic hepatocellular carcinoma | |
| CRL-2503 | Homo sapiens (human) Source: Organ: lung | NL20 |
| | Tissue: bronchus | |
| | Disease: normal | |
| CRL-2504 | Homo sapiens (human) Source: Organ: lung | NL20-TA |
| | Tissue: bronchus | [NL20T-A] |
| | Disease: normal | |
| CRL-2706 | Homo sapiens (human) Source: Organ: liver | THLE-2 |
| | Tissue: left lobe | |
| | Cell Type: epithelialSV40 transformed | |
| CRL-2741 | Homo sapiens (human) Source: Organ: lung | HBE135-E6E7 |
| | Tissue: bronchus | |
| | Cell Type: epithelialHPV-16 E6/E7 transformed | |
| CRL-2868 | Homo sapiens (human) Source: Organ: lung | HCC827 |
| | Disease: adenocarcinoma | |
| | Cell Type: epithelial | |
| CRL-2871 | Homo sapiens (human) Source: Organ: lung | HCC4006 |
| | Disease: adenocarcinoma | |
| | Derived from metastatic site: pleural effusion | |
| | Cell Type: epithelial | |
| CRL-5800 | Homo sapiens (human) Source: Organ: lung | NCI-H23 [H23] |
| | Disease: adenocarcinoma; non-small cell lung cancer | |
| CRL-5803 | Homo sapiens (human) Source: Organ: lung | NCI-H1299 |
| | Disease: carcinoma; non-small cell lung cancer | |
| | Derived from metastatic site: lymph node | |
| CRL-5804 | Homo sapiens (human) Source: Organ: lung | NCI-H187 [H187] |
| | Disease: carcinoma; classic small cell lung cancer | |
| | Derived from metastatic site: pleural effusion | |
| CRL-5807 | Homo sapiens (human) Source: Organ: lung | NCI-H358 [H-358, |
| | Tissue: bronchiole; alveolus | H358] |
| | Disease: bronchioalveolar carcinoma; non-small cell | |
| | lung cancer | |
| CRL-5808 | Homo sapiens (human) Source: Organ: lung | NCI-H378 [H378] |
| | Tumor Stage: stage E | |
| | Disease: carcinoma; classic small cell lung cancer | |
| | Derived from metastatic site: pleural effusion | |
| CRL-5810 | Homo sapiens (human) Source: Organ: lung | NCI-H522 [H522] |
| | Tumor Stage: stage 2 | |
| | Disease: adenocarcinoma; non-small cell lung cancer | |
| CRL-5811 | Homo sapiens (human) Source: Organ: lung | NCI-H526 [H526] |
| | Tumor Stage: stage E | |
| | Disease: carcinoma; variant small cell lung cancer | |
| | Derived from metastatic site: bone marrow | |
| CRL-5815 | Homo sapiens (human) Source: Organ: lung | NCI-H727 [H727] |
| | Tissue: bronchus | |
| | Disease: carcinoid | |
| CRL-5816 | Homo sapiens (human) Source: Organ: lung | NCI-H810 [H810] |
| | Tumor Stage: stage 2 | |
| | Disease: carcinoma; non-small cell lung cancer | |
| CRL-5817 | Homo sapiens (human) Source: Organ: lung | NCI-H889 [H889] |
| | Tumor Stage: stage E | |
| | Disease: carcinoma; classic small cell lung cancer | |
| | Derived from metastatic site: lymph node | |
| CRL-5818 | Homo sapiens (human) Source: Organ: lung | NCI-H1155 |
| | Disease: carcinoma; non-small cell lung cancer | [H1155] |
| | Derived from metastatic site: lymph node | |
| CRL-5819 | Homo sapiens (human) Source: Organ: lung | NCI-H1404 |
| | Disease: papillary adenocarcinoma | [H1404] |
| | Derived from metastatic site: lymph node | |
| CRL-5822 | Homo sapiens (human) Source: Organ: stomach | NCI-N87 [N87] |
| | Disease: gastric carcinoma | |
| | Derived from metastatic site: liver | |
| CRL-5823 | Homo sapiens (human) Source: Organ: lung | NCI-H196 [H196] |
| | Tumor Stage: stage E | |
| | Disease: carcinoma; variant small cell lung cancer | |
| | Derived from metastatic site: pleural effusion | |
| CRL-5824 | Homo sapiens (human) Source: Organ: lung | NCI-H211 [H211] |
| | Tumor Stage: stage E | |
| | Disease: carcinoma; small cell lung cancer | |
| | Derived from metastatic site: bone marrow | |
| CRL-5825 | Homo sapiens (human) Source: Organ: lung | NCI-H220 [H220] |
| | Tumor Stage: stage E | |
| | Disease: carcinoma; classic small cell lung cancer | |
| | Derived from metastatic site: pleural effusion | |
| CRL-5828 | Homo sapiens (human) Source: Organ: lung | NCI-H250 [H250] |
| | Tumor Stage: stage E | |
| | Disease: carcinoma; classic small cell lung cancer | |
| | Derived from metastatic site: brain | |
| CRL-5831 | Homo sapiens (human) Source: Organ: lung | NCI-H524 [H524] |
| | Tumor Stage: stage L | |
| | Disease: carcinoma; variant small cell lung cancer | |
| | Derived from metastatic site: lymph node | |
| CRL-5834 | Homo sapiens (human) Source: Organ: lung | NCI-H647 [H647] |
| | Tumor Stage: stage 3A | |
| | Disease: adenosquamous carcinoma; non-small cell lung | |
| | cancer | |
| | Derived from metastatic site: pleural effusion | |
| CRL-5835 | Homo sapiens (human) Source: Organ: lung | NCI-H650 [H650] |
| | Disease: bronchioalveolar carcinoma; non-small cell | |
| | lung cancer | |
| | Derived from metastatic site: lymph node | |
| CRL-5836 | Homo sapiens (human) Source: Organ: lung | NCI-H711 [H711] |
| | Tumor Stage: stage E | |
| | Disease: carcinoma; classic small cell lung cancer | |
| | Derived from metastatic site: bone marrow | |
| CRL-5837 | Homo sapiens (human) Source: Organ: lung | NCI-H719 [H719] |
| | Tumor Stage: stage E | |
| | Disease: carcinoma; classic small cell lung cancer | |
| | Derived from metastatic site: bone marrow | |
| CRL-5840 | Homo sapiens (human) Source: Organ: lung | NCI-H740 [H740] |
| | Tumor Stage: stage E | |
| | Disease: carcinoma; classic small cell lung cancer | |
| | Derived from metastatic site: lymph node | |
| CRL-5841 | Homo sapiens (human) Source: Organ: lung | NCI-H748 [H748] |
| | Tumor Stage: stage E | |
| | Disease: carcinoma; classic small cell lung cancer | |
| | Derived from metastatic site: lymph node | |
| CRL-5842 | Homo sapiens (human) Source: Organ: lung | NCI-H774 [H774] |
| | Tumor Stage: stage E | |
| | Disease: carcinoma; classic small cell lung cancer | |
| | Derived from metastatic site: soft tissue | |
| CRL-5844 | Homo sapiens (human) Source: Organ: lung | NCI-H838 [H838] |
| | Tumor stage: 3B | |
| | Disease: adenocarcinoma; non-small cell lung cancer | |
| | Derived from metastatic site: lymph node | |
| CRL-5845 | Homo sapiens (human) Source: Organ: lung | NCI-H841 [H841] |
| | Tumor Stage: stage L | |
| | Disease: carcinoma; variant small cell lung cancer | |
| | Derived from metastatic site: lymph node | |
| CRL-5846 | Homo sapiens (human) Source: Organ: lung | NCI-H847 [H847] |
| | Tumor Stage: stage L | |
| | Disease: carcinoma; classic small cell lung cancer | |
| | Derived from metastatic site: pleural effusion | |
| CRL-5849 | Homo sapiens (human) Source: Organ: lung | NCI-H865 [H865] |
| | Tumor Stage: stage L | |
| | Disease: carcinoma; classic small cell lung cancer | |
| | Derived from metastatic site: pleural effusion | |
| CRL-5850 | Homo sapiens (human) Source: Organ: lung | NCI-H920 [H920] |
| | Tumor Stage: stage 4 | |
| | Disease: adenocarcinoma; non-small cell lung cancer | |
| | Derived from metastatic site: lymph node | |
| CRL-5853 | Homo sapiens (human) Source: Organ: lung | NCI-H1048 |
| | Disease: carcinoma; small cell lung cancer | [H1048] |
| | Derived from metastatic site: pleural effusion | |
| CRL-5855 | Homo sapiens (human) Source: Organ: lung | NCI-H1092 |
| | Tumor Stage: stage E | [H1092] |
| | Disease: carcinoma; classic small cell lung cancer | |
| | Derived from metastatic site: bone marrow | |
| CRL-5856 | Homo sapiens (human) Source: Organ: lung | NCI-H1105 |
| | Tumor Stage: stage E | [H1105] |
| | Disease: carcinoma; classic small cell lung cancer | |
| | Derived from metastatic site: lymph node | |
| CRL-5858 | Homo sapiens (human) Source: Organ: lung | NCI-H1184 |
| | Tumor Stage: stage L | [H1184] |
| | Disease: carcinoma; small cell lung cancer | |
| | Derived from metastatic site: lymph node | |
| CRL-5859 | Homo sapiens (human) Source: Organ: lung | NCI-H1238 |
| | Tumor Stage: stage E | [H1238] |
| | Disease: carcinoma; small cell lung cancer | |
| | Derived from metastatic site: bone marrow | |
| CRL-5864 | Homo sapiens (human) Source: Organ: lung | NCI-H1341 |
| | Disease: carcinoma; small cell lung cancer | [H1341] |
| | Derived from metastatic site: cervix | |
| CRL-5867 | Homo sapiens (human) Source: Organ: lung | NCI-H1385 |
| | Tumor Stage: stage 3A | [H1385] |
| | Disease: carcinoma; non-small cell lung cancer | |
| | Derived from metastatic site: lymph node | |
| CRL-5869 | Homo sapiens (human) Source: Organ: lung | NCI-H1417 |
| | Tumor Stage: stage E | [H1417] |
| | Disease: carcinoma; classic small cell lung cancer | |
| CRL-5870 | Homo sapiens (human) Source: Organ: lung | NCI-H1435 |
| | Disease: adenocarcinoma; non-small cell lung cancer | [H1435] |
| CRL-5871 | Homo sapiens (human) Source: Organ: lung | NCI-H1436 |
| | Tumor Stage: stage E | [H1436] |
| | Disease: carcinoma; classic small cell lung cancer | |
| | Derived from metastatic site: lymph node | |
| CRL-5872 | Homo sapiens (human) Source: Organ: lung | NCI-H1437 |
| | Tumor Stage: stage 1 | [H1437] |
| | Disease: adenocarcinoma; non-small cell lung cancer | |
| | Derived from metastatic site: pleural effusion | |
| CRL-5874 | Homo sapiens (human) Source: Organ: lung | NCI-H1522 |
| | Tumor Stage: stage E | [H1522] |
| | Disease: carcinoma; small cell lung cancer | |
| | Derived from metastatic site: pleural effusion | |
| CRL-5875 | Homo sapiens (human) Source: Organ: lung | NCI-H1563 |
| | Disease: adenocarcinoma; non-small cell lung cancer | [H1563] |
| CRL-5876 | Homo sapiens (human) Source: Organ: lung | NCI-H1568 |
| | Disease: adenocarcinoma; non-small cell lung cancer | [H1568] |
| | Derived from metastatic site: lymph node | |
| CRL-5877 | Homo sapiens (human) Source: Organ: lung | NCI-H1573 |
| | Tumor Stage: stage 4 | [H1573] |
| | Disease: adenocarcinoma | |
| | Derived from metastatic site: soft tissue | |
| CRL-5878 | Homo sapiens (human) Source: Organ: lung | NCI-H1581 |
| | Tumor Stage: stage 4 | [H1581] |
| | Disease: non-small cell lung cancer | |
| | Cell Type: large cell; | |
| CRL-5879 | Homo sapiens (human) Source: Tumor Stage: stage E | NCI-H1618 |
| | Disease: carcinoma; small cell lung cancer | [H1618] |
| | Derived from metastatic site: bone marrow | |
| CRL-5881 | Homo sapiens (human) Source: Organ: lung | NCI-H1623 |
| | Tumor Stage: stage 3B | [H1623] |
| | Disease: adenocarcinoma; non-small cell lung cancer | |
| | Derived from metastatic site: lymph node | |
| CRL-5883 | Homo sapiens (human) Source: Organ: lung | NCI-H1650 [H- |
| | Tumor Stage: stage 3B | 1650, H1650] |
| | Disease: adenocarcinoma; bronchoalveolar carcinoma | |
| | Derived from metastatic site: pleural effusion | |
| CRL-5884 | Homo sapiens (human) Source: Organ: lung | NCI-H1651 |
| | Disease: adenocarcinoma; non-small cell lung cancer | [H1651] |
| CRL-5885 | Homo sapiens (human) Source: Organ: lung | NCI-H1666 [H- |
| | Disease: adenocarcinoma; bronchoalveolar carcinoma | 1666, H1666] |
| | Derived from metastatic site: pleural effusion | |
| CRL-5886 | Homo sapiens (human) Source: Organ: lung | NCI-H1672 |
| | Tumor Stage: stage L | [H1672] |
| | Disease: carcinoma; classic small cell lung cancer | |
| CRL-5887 | Homo sapiens (human) Source: Organ: lung | NCI-H1693 |
| | Tumor Stage: stage 3B | [H1693] |
| | Disease: adenocarcinoma; non-small cell lung cancer | |
| | Derived from metastatic site: lymph node | |
| CRL-5888 | Homo sapiens (human) Source: Organ: lung | NCI-H1694 |
| | Tumor Stage: stage E | [H1694] |
| | Disease: carcinoma; classic small cell lung cancer | |
| | Derived from metastatic site: ascites | |
| CRL-5889 | Homo sapiens (human) Source: Organ: lung | NCI-H1703 |
| | Tumor Stage: stage 1 | [H1703] |
| | Disease: non-small cell lung cancer | |
| | Cell Type: squamous cell; | |
| CRL-5891 | Homo sapiens (human) Source: Organ: lung | NCI-H1734 [H- |
| | Disease: adenocarcinoma; non-small cell lung cancer | 1734, H1734] |
| CRL-5892 | Homo sapiens (human) Source: Organ: lung | NCI-H1755 |
| | Tumor Stage: stage 4 | [H1755] |
| | Disease: adenocarcinoma; non-small cell lung cancer | |
| | Derived from metastatic site: liver | |
| CRL-5892 | Homo sapiens (human) Source: Organ: lung | NCI-H1755 |
| | Tumor Stage: stage 4 | [H1755] |
| | Disease: adenocarcinoma; non-small cell lung cancer | |
| | Derived from metastatic site: liver | |
| CRL-5893 | Homo sapiens (human) Source: Organ: lung | NCI-H1770 |
| | Tumor Stage: stage 4 | [H1770] |
| | Disease: carcinoma; non-small cell lung cancer | |
| | Derived from metastatic site: lymph node | |
| | Cell Type: neuroendocrine; | |
| CRL-5896 | Homo sapiens (human) Source: Organ: lung | NCI-H1793 |
| | Disease: adenocarcinoma; non-small cell lung cancer | [H1793] |
| CRL-5898 | Homo sapiens (human) Source: Organ: lung | NCI-H1836 |
| | Tumor Stage: stage L | [H1836] |
| | Disease: carcinoma; classic small cell lung cancer | |
| CRL-5899 | Homo sapiens (human) Source: Organ: lung | NCI-H1838 |
| | Disease: adenocarcinoma; non-small cell lung cancer | [H1838] |
| CRL-5900 | Homo sapiens (human) Source: Organ: lung | NCI-H1869 |
| | Tumor Stage: stage 4 | [H1869] |
| | Disease: non-small cell lung cancer | |
| | Derived from metastatic site: pleural effusion | |
| | Cell Type: squamous cell; | |
| CRL-5902 | Homo sapiens (human) Source: Organ: lung | NCI-H1876 |
| | Tumor Stage: stage E | [H1876] |
| | Disease: carcinoma; classic small cell lung cancer | |
| | Derived from metastatic site: lymph node | |
| CRL-5903 | Homo sapiens (human) Source: Organ: lung | NCI-H1882 |
| | Tumor Stage: stage E | [H1882] |
| | Disease: carcinoma; small cell lung cancer | |
| | Derived from metastatic site: bone marrow | |
| CRL-5904 | Homo sapiens (human) Source: Organ: lung | NCI-H1915 |
| | Tumor Stage: stage 4 | [H1915] |
| | Disease: poorly differentiated carcinoma; non-small cell | |
| | lung cancer | |
| | Derived from metastatic site: brain | |
| | Cell Type: large cell; | |
| CRL-5906 | Homo sapiens (human) Source: Organ: lung | NCI-H1930 |
| | Tumor Stage: stage L | [H1930] |
| | Disease: carcinoma; classic small cell lung cancer | |
| | Derived from metastatic site: lymph node | |
| CRL-5907 | Homo sapiens (human) Source: Organ: lung | NCI-H1944 |
| | Tumor Stage: stage 3B | [H1944] |
| | Disease: adenocarcinoma; non-small cell lung cancer | |
| | Derived from metastatic site: soft tissue | |
| CRL-5908 | Homo sapiens (human) Source: Organ: lung | NCI-H1975 [H- |
| | Disease: adenocarcinoma; non-small cell lung cancer | 1975, H1975] |
| CRL-5909 | Homo sapiens (human) Source: Organ: lung | NCI-H1993 |
| | Tumor Stage: stage 3A | [H1993] |
| | Disease: adenocarcinoma; non-small cell lung cancer | |
| | Derived from metastatic site: lymph node | |
| CRL-5912 | Homo sapiens (human) Source: Organ: lung | NCI-H2023 |
| | Tumor Stage: stage 3A | [H2023] |
| | Disease: adenocarcinoma; non-small cell lung cancer | |
| | Derived from metastatic site: lymph node | |
| CRL-5913 | Homo sapiens (human) Source: Organ: lung | NCI-H2029 |
| | Tumor Stage: stage E | [H2029] |
| | Disease: carcinoma; small cell lung cancer | |
| | Derived from metastatic site: lymph node | |
| CRL-5914 | Homo sapiens (human) Source: Organ: lung | NCI-H2030 |
| | Disease: adenocarcinoma; non-small cell lung cancer | [H2030] |
| | Derived from metastatic site: lymph node | |
| CRL-5917 | Homo sapiens (human) Source: Organ: lung | NCI-H2066 |
| | Tumor Stage: stage 1 | [H2066] |
| | Disease: mixed; small cell lung cancer; adenocarcinoma; | |
| | squamous cell carcinoma | |
| CRL-5918 | Homo sapiens (human) Source: Organ: lung | NCI-H2073 |
| | Tumor Stage: stage 3A | [H2073] |
| | Disease: adenocarcinoma; non-small cell lung cancer | |
| CRL-5920 | Homo sapiens (human) Source: Organ: lung | NCI-H2081 |
| | Tumor Stage: stage E | [H2081] |
| | Disease: carcinoma; classic small cell lung cancer | |
| | Derived from metastatic site: pleural effusion | |
| CRL-5921 | Homo sapiens (human) Source: Organ: lung | NCI-H2085 |
| | Disease: adenocarcinoma; non-small cell lung cancer | [H2085] |
| CRL-5922 | Homo sapiens (human) Source: Organ: lung | NCI-H2087 |
| | Tumor Stage: stage 1 | [H2087] |
| | Disease: adenocarcinoma; non-small cell lung cancer | |
| | Derived from metastatic site: lymph node | |
| CRL-5923 | Homo sapiens (human) Source: Organ: lung | NCI-H2106 |
| | Tissue: neuroendocrine | [H2106] |
| | Tumor Stage: stage 4 | |
| | Disease: non-small cell lung cancer | |
| | Derived from metastatic site: lymph node | |
| CRL-5924 | Homo sapiens (human) Source: Organ: lung | NCI-H2110 |
| | Disease: non-small cell lung cancer | [H2110] |
| | Derived from metastatic site: pleural effusion | |
| CRL-5926 | Homo sapiens (human) Source: Organ: lung | NCI-H2135 |
| | Disease: non-small cell lung cancer | [H2135] |
| CRL-5927 | Homo sapiens (human) Source: Organ: lung | NCI-H2141 |
| | Tumor Stage: stage E | [H2141] |
| | Disease: carcinoma; small cell lung cancer | |
| | Derived from metastatic site: lymph node | |
| CRL-5929 | Homo sapiens (human) Source: Organ: lung | NCI-H2171 |
| | Tumor Stage: stage E | [H2171] |
| | Disease: carcinoma; small cell lung cancer | |
| | Derived from metastatic site: pleural effusion | |
| CRL-5930 | Homo sapiens (human) Source: Organ: lung | NCI-H2172 |
| | Disease: non-small cell lung cancer | [H2172] |
| CRL-5931 | Homo sapiens (human) Source: Organ: lung | NCI-H2195 |
| | Tumor Stage: stage E | [H2195] |
| | Disease: carcinoma; small cell lung cancer | |
| | Derived from metastatic site: bone marrow | |
| CRL-5932 | Homo sapiens (human) Source: Organ: lung | NCI-H2196 |
| | Tumor Stage: stage E | [H2196] |
| | Disease: carcinoma; small cell lung cancer | |
| | Derived from metastatic site: bone marrow | |
| CRL-5933 | Homo sapiens (human) Source: Organ: lung | NCI-H2198 |
| | Tumor Stage: stage E | [H2198] |
| | Disease: carcinoma; small cell lung cancer | |
| | Derived from metastatic site: lymph node | |
| CRL-5934 | Homo sapiens (human) Source: Organ: lung | NCI-H2227 |
| | Tumor Stage: stage E | [H2227] |
| | Disease: carcinoma; small cell lung cancer | |
| CRL-5935 | Homo sapiens (human) Source: Organ: lung | NCI-H2228 |
| | Disease: adenocarcinoma; non-small cell lung cancer | [H2228] |
| CRL-5938 | Homo sapiens (human) Source: Organ: lung | NCI-H2286 |
| | Tumor Stage: stage 1 | [H2286] |
| | Disease: mixed; small cell lung cancer; adenocarcinoma; | |
| | squamous cell carcinoma | |
| CRL-5939 | Homo sapiens (human) Source: Organ: lung | NCI-H2291 |
| | Disease: adenocarcinoma; non-small cell lung cancer | [H2291] |
| | Derived from metastatic site: lymph node | |
| CRL-5940 | Homo sapiens (human) Source: Organ: lung | NCI-H2330 |
| | Tumor Stage: stage L | [H2330] |
| | Disease: carcinoma; small cell lung cancer | |
| | Derived from metastatic site: lymph node | |
| CRL-5941 | Homo sapiens (human) Source: Organ: lung | NCI-H2342 |
| | Tumor Stage: stage 3A | [H2342] |
| | Disease: adenocarcinoma; non-small cell lung cancer | |
| CRL-5942 | Homo sapiens (human) Source: Organ: lung | NCI-H2347 |
| | Tumor Stage: stage 1 | [H2347] |
| | Disease: adenocarcinoma; non-small cell lung cancer | |
| CRL-5944 | Homo sapiens (human) Source: Organ: lung | NCI-H2405 |
| | Tumor Stage: stage 4 | [H2405] |
| | Disease: adenocarcinoma; non-small cell lung cancer | |
| | Derived from metastatic site: ascites | |
| CRL-5945 | Homo sapiens (human) Source: Organ: lung | NCI-H2444 |
| | Disease: non-small cell lung cancer | [H2444] |
| CRL-5975 | Homo sapiens (human) Source: Organ: lung | UMC-11 |
| | Disease: carcinoid | |
| CRL-5976 | Homo sapiens (human) Source: Organ: lung | NCI-H64 [H64] |
| | Tumor Stage: stage E | |
| | Disease: carcinoma; small cell lung cancer | |
| | Derived from metastatic site: lymph node | |
| CRL-5978 | Homo sapiens (human) Source: Organ: lung | NCI-H735 [H735] |
| | Tumor Stage: stage E | |
| | Disease: carcinoma; small cell lung cancer | |
| | Derived from metastatic site: liver | |
| CRL-5978 | Homo sapiens (human) Source: Organ: lung | NCI-H735 [H735] |
| | Tumor Stage: stage E | |
| | Disease: carcinoma; small cell lung cancer | |
| | Derived from metastatic site: liver | |
| CRL-5982 | Homo sapiens (human) Source: Organ: lung | NCI-H1963 |
| | Tumor Stage: stage L | [H1963] |
| | Disease: carcinoma; small cell lung cancer | |
| CRL-5983 | Homo sapiens (human) Source: Organ: lung | NCI-H2107 |
| | Tumor Stage: stage E | [H2107] |
| | Disease: carcinoma; small cell lung cancer | |
| | Derived from metastatic site: bone marrow | |
| CRL-5984 | Homo sapiens (human) Source: Organ: lung | NCI-H2108 |
| | Tumor Stage: stage E | [H2108] |
| | Disease: carcinoma; small cell lung cancer | |
| | Derived from metastatic site: bone marrow | |
| CRL-5985 | Homo sapiens (human) Source: Organ: lung | NCI-H2122 |
| | Tumor Stage: stage 4 | [H2122] |
| | Disease: adenocarcinoma; non-small cell lung cancer | |
| | Derived from metastatic site: pleural effusion | |
| CRL-7343 | Homo sapiens (human) Source: Organ: lung | Hs 573.T |
| | Disease: cancer | |
| CRL-7344 | Homo sapiens (human) Source: Organ: lung | Hs 573.Lu |
| CRL-8024 | Homo sapiens (human) Source: Organ: liver | PLC/PRF/5 |
| | Disease: hepatoma | |
| | Cell Type: Alexander cells; | |
| CRL-9609 | Homo sapiens (human) Source: Organ: lung | BEAS-2B |
| | Tissue: bronchus | |
| | Disease: normal | |
| | Cell Type: epithelialvirus transformed | |
| HB-8065 | Homo sapiens (human) Source: Organ: liver | Hep G2 |
| | Disease: hepatocellular carcinoma | |
| HTB-105 | Homo sapiens (human) Source: Organ: testes | Tera-1 |
| | Disease: embryonal carcinoma, malignant | |
| | Derived from metastatic site: lung | |
| HTB-106 | Homo sapiens (human) Source: Disease: malignant | Tera-2 |
| | embryonal carcinoma | |
| | Derived from metastatic site: lung | |
| HTB-119 | Homo sapiens (human) Source: Organ: lung | NCI-H69 [H69] |
| | Disease: carcinoma; small cell lung cancer | |
| HTB-120 | Homo sapiens (human) Source: Organ: lung | NCI-H128 [H128] |
| | Disease: carcinoma; small cell lung cancer | |
| | Derived from metastatic site: pleural effusion | |
| HTB-168 | Homo sapiens (human) Source: Organ: lung | ChaGo-K-1 |
| | Tissue: bronchus | |
| | Disease: bronchogenic carcinoma | |
| HTB-171 | Homo sapiens (human) Source: Organ: lung | NCI-H446 [H446] |
| | Disease: carcinoma; small cell lung cancer | |
| | Derived from metastatic site: pleural effusion | |
| HTB-172 | Homo sapiens (human) Source: Organ: lung | NCI-H209 [H209] |
| | Disease: carcinoma; small cell lung cancer | |
| | Derived from metastatic site: bone marrow | |
| HTB-173 | Homo sapiens (human) Source: Organ: lung | NCI-H146 [H146] |
| | Disease: carcinoma; small cell lung cancer | |
| | Derived from metastatic site: bone marrow | |
| HTB-174 | Homo sapiens (human) Source: Organ: lung | NCI-H441 [H441] |
| | Disease: papillary adenocarcinoma | |
| HTB-175 | Homo sapiens (human) Source: Organ: lung | NCI-H82 [H82] |
| | Disease: carcinoma; small cell lung cancer | |
| | Derived from metastatic site: pleural effusion | |
| HTB-177 | Homo sapiens (human) Source: Organ: lung | NCI-H460 [H460] |
| | Disease: carcinoma; large cell lung cancer | |
| | Derived from metastatic site: pleural effusion | |
| HTB-178 | Homo sapiens (human) Source: Organ: lung | NCI-H596 [H596] |
| | Disease: adenosquamous carcinoma | |
| HTB-179 | Homo sapiens (human) Source: Organ: lung | NCI-H676B |
| | Disease: adenocarcinoma | [H676B] |
| | Derived from metastatic site: pleural effusion | |
| HTB-180 | Homo sapiens (human) Source: Organ: lung | NCI-H345 [H345] |
| | Disease: carcinoma; small cell lung cancer | |
| | Derived from metastatic site: bone marrow | |
| HTB-181 | Homo sapiens (human) Source: Organ: lung | NCI-H820 [H820] |
| | Disease: papillary adenocarcinoma | |
| | Derived from metastatic site: lymph node | |
| HTB-182 | Homo sapiens (human) Source: Organ: lung | NCI-H520 [H520] |
| | Disease: squamous cell carcinoma | |
| HTB-183 | Homo sapiens (human) Source: Organ: lung | NCI-H661 [H661] |
| | Disease: carcinoma; large cell lung cancer | |
| | Derived from metastatic site: lymph node | |
| HTB-184 | Homo sapiens (human) Source: Organ: lung | NCI-H510A |
| | Disease: carcinoma; small cell lung cancer; | [H510A, NCI- |
| | extrapulmonary origin | H510] |
| | Derived from metastatic site: adrenal gland | |
| HTB-52 | Homo sapiens (human) Source: Organ: liver | SK-HEP-1 |
| | Tissue: ascites | |
| | Disease: adenocarcinoma | |
| HTB-53 | Homo sapiens (human) Source: Organ: lung | A-427 |
| | Disease: carcinoma | |
| HTB-54 | Homo sapiens (human) Source: Organ: lung | Calu-1 |
| | Tumor Stage: grade III | |
| | Disease: epidermoid carcinoma | |
| | Derived from metastatic site: pleura | |
| HTB-55 | Homo sapiens (human) Source: Organ: lung | Calu-3 |
| | Disease: adenocarcinoma | |
| | Derived from metastatic site: pleural effusion | |
| HTB-56 | Homo sapiens (human) Source: Organ: unknown, | Calu-6 |
| | probably lung | |
| | Disease: anaplastic carcinoma | |
| HTB-57 | Homo sapiens (human) Source: Organ: lung | SK-LU-1 |
| | Disease: adenocarcinoma | |
| HTB-58 | Homo sapiens (human) Source: Organ: lung | SK-MES-1 |
| | Disease: squamous cell carcinoma | |
| | Derived from metastatic site: pleural effusion | |
| HTB-59 | Homo sapiens (human) Source: Organ: lung | SW 900 [SW-900, |
| | Tumor Stage: grade IV | SW900] |
| | Disease: squamous cell carcinoma | |
| HTB-64 | Homo sapiens (human) Source: Disease: malignant | Malme-3M |
| | melanoma | |
| | Derived from metastatic site: lung | |
| HTB-79 | Homo sapiens (human) Source: Organ: pancreas | Capan-1 |
| | Disease: adenocarcinoma | |
| | Derived from metastatic site: liver | |

### Example 23

### Utilization of Heterologous 5′UTRs

[1153] A 5′ UTR may be provided as a flanking region to the polynucleotides, primary constructs or mmRNA of the invention. 5′UTR may be homologous or heterologous to the coding region found in the polynucleotides, primary constructs or mmRNA of the invention. Multiple 5′ UTRs may be included in the flanking region and may be the same or of different sequences. Any portion of the flanking regions, including none, may be codon optimized and any may independently contain one or more different structural or chemical modifications, before and/or after codon optimization.

[1154] Shown in Table 21 is a listing of the start and stop site of the polynucleotides, primary constructs or mmRNAs of the invention. Each 5′UTR (5′UTR-005 to 5′UTR 68511) is identified by its start and stop site relative to its native or wild type (homologous) transcript (ENST; the identifier used in the ENSEMBL database).

TABLE 21
5′Untranslated Regions

| 5′ UTR ID | ENST ID | 5′ UTR Start | 5′ UTR Stop |
|---|---|---|---|
| 5UTR-005 | 233 | 1 | 147 |
| 5UTR-006 | 233 | 1 | 154 |
| 5UTR-007 | 412 | 1 | 275 |
| 5UTR-008 | 412 | 1 | 469 |
| 5UTR-009 | 442 | 1 | 171 |
| 5UTR-010 | 442 | 1 | 177 |
| 5 | 1008 | 1 | 187 |
| 5UTR-012 | 1008 | 1 | 198 |
| 5UTR-013 | 1146 | 1 | 204 |
| 5UTR-014 | 2125 | 1 | 40 |
| 5UTR-015 | 2125 | 1 | 75 |
| 5UTR-016 | 2165 | 1 | 56 |
| 5UTR-017 | 2165 | 1 | 249 |
| 5UTR-018 | 2501 | 1 | 132 |
| 5UTR-019 | 2501 | 1 | 188 |
| 5UTR-020 | 2596 | 1 | 323 |
| 5UTR-021 | 2596 | 1 | 1175 |
| 5UTR-022 | 2829 | 1 | 198 |
| 5UTR-023 | 2829 | 1 | 484 |
| 5UTR-024 | 3084 | 1 | 132 |
| 5UTR-025 | 3100 | 1 | 162 |
| 5UTR-026 | 3100 | 1 | 166 |
| 5UTR-027 | 3302 | 1 | 33 |
| 5UTR-028 | 3302 | 1 | 69 |
| 5UTR-029 | 3583 | 1 | 142 |
| 5UTR-030 | 3583 | 1 | 189 |
| 5UTR-031 | 3834 | 1 | 100 |
| 5UTR-032 | 3912 | 1 | 715 |
| 5UTR-033 | 4103 | 1 | 78 |
| 5UTR-034 | 4103 | 1 | 301 |
| 5UTR-035 | 4531 | 1 | 48 |
| 5UTR-036 | 4921 | 1 | 60 |
| 5UTR-037 | 4921 | 1 | 63 |
| 5UTR-038 | 4980 | 1 | 325 |
| 5UTR-039 | 4980 | 1 | 479 |
| 5UTR-040 | 4982 | 1 | 21 |
| 5UTR-041 | 5082 | 1 | 76 |
| 5UTR-042 | 5082 | 1 | 182 |
| 5UTR-043 | 5178 | 1 | 198 |
| 5UTR-044 | 5178 | 1 | 320 |
| 5UTR-045 | 5180 | 1 | 81 |
| 5UTR-046 | 5226 | 1 | 109 |
| 5UTR-047 | 5257 | 1 | 310 |
| 5UTR-048 | 5257 | 1 | 380 |
| 5UTR-049 | 5259 | 1 | 339 |
| 5UTR-050 | 5260 | 1 | 216 |
| 5UTR-051 | 5260 | 1 | 263 |
| 5UTR-052 | 5284 | 1 | 1202 |
| 5UTR-053 | 5286 | 1 | 153 |
| 5UTR-054 | 5286 | 1 | 193 |
| 5UTR-055 | 5340 | 1 | 282 |
| 5UTR-056 | 5340 | 5 | 287 |
| 5UTR-057 | 5374 | 1 | 93 |
| 5UTR-058 | 5374 | 1 | 132 |
| 5UTR-059 | 5386 | 1 | 116 |
| 5UTR-060 | 5558 | 1 | 470 |
| 5UTR-061 | 5756 | 1 | 194 |
| 5UTR-062 | 5905 | 1 | 99 |
| 5UTR-063 | 5905 | 1 | 103 |
| 5UTR-064 | 5995 | 1 | 42 |
| 5UTR-065 | 5995 | 1 | 106 |
| 5UTR-066 | 6015 | 1 | 72 |
| 5UTR-067 | 6053 | 1 | 67 |
| 5UTR-068 | 6053 | 1 | 106 |
| 5UTR-069 | 6101 | 1 | 13 |
| 5UTR-070 | 6251 | 1 | 194 |
| 5UTR-071 | 6251 | 1 | 269 |
| 5UTR-072 | 6251 | 1 | 443 |
| 5UTR-073 | 6275 | 1 | 9 |
| 5UTR-074 | 6275 | 1 | 25 |
| 5UTR-075 | 6658 | 1 | 120 |
| 5UTR-076 | 6724 | 1 | 2 |
| 5UTR-077 | 6724 | 1 | 202 |
| 5UTR-078 | 6750 | 1 | 83 |
| 5UTR-079 | 6750 | 1 | 93 |
| 5UTR-080 | 6777 | 1 | 84 |
| 5UTR-081 | 6777 | 1 | 135 |
| 5UTR-082 | 6967 | 1 | 4 |
| 5UTR-083 | 7264 | 1 | 135 |
| 5UTR-084 | 7390 | 1 | 68 |
| 5UTR-085 | 7390 | 1 | 107 |
| 5UTR-086 | 7414 | 1 | 203 |
| 5UTR-087 | 7510 | 1 | 144 |
| 5UTR-088 | 7516 | 1 | 28 |
| 5UTR-089 | 7516 | 1 | 66 |
| 5UTR-090 | 7699 | 1 | 57 |
| 5UTR-091 | 7708 | 1 | 190 |
| 5UTR-092 | 7708 | 1 | 391 |
| 5UTR-093 | 7722 | 1 | 464 |
| 5UTR-094 | 7735 | 1 | 45 |
| 5UTR-095 | 7969 | 1 | 220 |
| 5UTR-096 | 8180 | 1 | 73 |
| 5UTR-097 | 8180 | 1 | 78 |
| 5UTR-098 | 8180 | 1 | 85 |
| 5UTR-099 | 8391 | 1 | 228 |
| 5UTR-100 | 8391 | 1 | 512 |
| 5UTR-101 | 8440 | 1 | 128 |
| 5UTR-102 | 8527 | 1 | 868 |
| 5UTR-103 | 8527 | 1 | 896 |
| 5UTR-104 | 8938 | 1 | 277 |
| 5UTR-105 | 9041 | 1 | 257 |
| 5UTR-106 | 9041 | 1 | 273 |
| 5UTR-107 | 9105 | 1 | 245 |
| 5UTR-108 | 9180 | 1 | 51 |
| 5UTR-109 | 9530 | 1 | 2 |
| 5UTR-22841 | 349114 | 1 | 8 |
| 5UTR-22842 | 349124 | 1 | 334 |
| 5UTR-22843 | 349129 | 1 | 260 |
| 5UTR-22844 | 349139 | 1 | 47 |
| 5UTR-22845 | 349139 | 1 | 66 |
| 5UTR-22846 | 349155 | 1 | 964 |
| 5UTR-22847 | 349157 | 1 | 49 |
| 5UTR-22848 | 349157 | 1 | 83 |
| 5UTR-22849 | 349184 | 1 | 301 |
| 5UTR-22850 | 349213 | 1 | 498 |
| 5UTR-22851 | 349213 | 1 | 500 |
| 5UTR-22852 | 349215 | 1 | 278 |
| 5UTR-22853 | 349223 | 1 | 24 |
| 5UTR-22854 | 349223 | 1 | 316 |
| 5UTR-22855 | 349225 | 1 | 281 |
| 5UTR-22856 | 349228 | 1 | 564 |
| 5UTR-22857 | 349228 | 1 | 748 |
| 5UTR-22858 | 349238 | 1 | 165 |
| 5UTR-22859 | 349238 | 1 | 191 |
| 5UTR-22860 | 349241 | 1 | 147 |
| 5UTR-22861 | 349241 | 1 | 221 |
| 5UTR-22862 | 349243 | 1 | 388 |
| 5UTR-22863 | 349258 | 1 | 545 |
| 5UTR-22864 | 349299 | 1 | 50 |
| 5UTR-22865 | 349299 | 1 | 155 |
| 5UTR-22866 | 349310 | 1 | 424 |
| 5UTR-22867 | 349310 | 1 | 431 |
| 5UTR-22868 | 349311 | 1 | 243 |
| 5UTR-22869 | 349314 | 1 | 38 |
| 5UTR-22870 | 349320 | 1 | 389 |
| 5UTR-22871 | 349321 | 1 | 119 |
| 5UTR-22872 | 349321 | 1 | 134 |
| 5UTR-22873 | 349334 | 1 | 34 |
| 5UTR-22874 | 349334 | 1 | 78 |
| 5UTR-22875 | 349339 | 1 | 156 |
| 5UTR-22876 | 349363 | 1 | 42 |
| 5UTR-22877 | 349379 | 1 | 323 |
| 5UTR-22878 | 349384 | 1 | 314 |
| 5UTR-22879 | 349394 | 1 | 175 |
| 5UTR-22880 | 349423 | 1 | 10 |
| 5UTR-22881 | 349431 | 1 | 220 |
| 5UTR-22882 | 349438 | 1 | 19 |
| 5UTR-22883 | 349438 | 1 | 86 |
| 5UTR-22884 | 349441 | 1 | 87 |
| 5UTR-22885 | 349441 | 1 | 206 |
| 5UTR-22886 | 349451 | 1 | 412 |
| 5UTR-22887 | 349455 | 1 | 50 |
| 5UTR-22888 | 349455 | 1 | 59 |
| 5UTR-22889 | 349456 | 1 | 148 |
| 5UTR-22890 | 349456 | 1 | 198 |
| 5UTR-22891 | 349457 | 114 | 123 |
| 5UTR-22892 | 349458 | 1 | 424 |
| 5UTR-22893 | 349458 | 1 | 589 |
| 5UTR-22894 | 349459 | 1 | 164 |
| 5UTR-22895 | 349459 | 1 | 284 |
| 5UTR-22896 | 349460 | 1 | 801 |
| 5UTR-22897 | 349460 | 1 | 834 |
| 5UTR-22898 | 349466 | 1 | 326 |
| 5UTR-22899 | 349485 | 1 | 25 |
| 5UTR-22900 | 349485 | 1 | 27 |
| 5UTR-22901 | 349495 | 1 | 41 |
| 5UTR-22902 | 349496 | 1 | 268 |
| 5UTR-22903 | 349496 | 1 | 280 |
| 5UTR-22904 | 349503 | 1 | 343 |
| 5UTR-22905 | 349505 | 1 | 373 |
| 5UTR-22906 | 349511 | 1 | 20 |
| 5UTR-22907 | 349511 | 1 | 55 |
| 5UTR-22908 | 349527 | 1 | 21 |
| 5UTR-22909 | 349533 | 1 | 185 |
| 5UTR-22910 | 349553 | 1 | 80 |
| 5UTR-22911 | 349555 | 1 | 144 |
| 5UTR-22912 | 349555 | 1 | 282 |
| 5UTR-22913 | 349556 | 1 | 5 |
| 5UTR-22914 | 349556 | 1 | 85 |
| 5UTR-22915 | 349570 | 1 | 165 |
| 5UTR-22916 | 349570 | 1 | 267 |
| 5UTR-22917 | 349598 | 1 | 69 |
| 5UTR-22918 | 349598 | 1 | 158 |
| 5UTR-22919 | 349606 | 1 | 504 |
| 5UTR-22920 | 349607 | 1 | 40 |
| 5UTR-22921 | 349607 | 1 | 156 |
| 5UTR-22922 | 349618 | 1 | 81 |
| 5UTR-22923 | 349624 | 1 | 91 |
| 5UTR-22924 | 349637 | 1 | 58 |
| 5UTR-22925 | 349653 | 1 | 5 |
| 5UTR-22926 | 349655 | 1 | 108 |
| 5UTR-22927 | 349693 | 1 | 28 |
| 5UTR-22928 | 349697 | 1 | 261 |
| 5UTR-22929 | 349697 | 1 | 340 |
| 5UTR-22930 | 349699 | 1 | 44 |
| 5UTR-22931 | 349703 | 1 | 110 |
| 5UTR-22932 | 349703 | 1 | 140 |
| 5UTR-22933 | 349716 | 1 | 577 |
| 5UTR-22934 | 349716 | 1 | 632 |
| 5UTR-22935 | 349718 | 1 | 209 |
| 5UTR-22936 | 349718 | 1 | 236 |
| 5UTR-22937 | 349721 | 1 | 99 |
| 5UTR-22938 | 349736 | 1 | 238 |
| 5UTR-22939 | 349736 | 1 | 259 |
| 5UTR-22940 | 349736 | 1 | 276 |
| 5UTR-22941 | 349747 | 1 | 487 |
| 5UTR-22942 | 349748 | 1 | 221 |
| 5UTR-22943 | 349748 | 1 | 306 |
| 5UTR-22944 | 349752 | 1 | 640 |
| 5UTR-22945 | 349767 | 1 | 405 |
| 5UTR-45677 | 402744 | 1 | 280 |
| 5UTR-45678 | 402746 | 1 | 198 |
| 5UTR-45679 | 402764 | 1 | 439 |
| 5UTR-45680 | 402774 | 1 | 366 |
| 5UTR-45681 | 402775 | 1 | 96 |
| 5UTR-45682 | 402785 | 1 | 97 |
| 5UTR-45683 | 402794 | 1 | 140 |
| 5UTR-45684 | 402799 | 1 | 165 |
| 5UTR-45685 | 402799 | 1 | 191 |
| 5UTR-45686 | 402799 | 1 | 215 |
| 5UTR-45687 | 402802 | 1 | 408 |
| 5UTR-45688 | 402802 | 1 | 843 |
| 5UTR-45689 | 402813 | 1 | 141 |
| 5UTR-45690 | 402813 | 1 | 143 |
| 5UTR-45691 | 402815 | 1 | 286 |
| 5UTR-45692 | 402825 | 1 | 38 |
| 5UTR-45693 | 402844 | 1 | 981 |
| 5UTR-45694 | 402845 | 1 | 313 |
| 5UTR-45695 | 402849 | 1 | 83 |
| 5UTR-45696 | 402859 | 1 | 524 |
| 5UTR-45697 | 402860 | 1 | 344 |
| 5UTR-45698 | 402860 | 1 | 382 |
| 5UTR-45699 | 402865 | 1 | 93 |
| 5UTR-45700 | 402866 | 1 | 268 |
| 5UTR-45701 | 402868 | 1 | 42 |
| 5UTR-45702 | 402868 | 1 | 426 |
| 5UTR-45703 | 402874 | 1 | 270 |
| 5UTR-45704 | 402881 | 1 | 497 |
| 5UTR-45705 | 402904 | 1 | 369 |
| 5UTR-45706 | 402905 | 1 | 321 |
| 5UTR-45707 | 402906 | 1 | 209 |
| 5UTR-45708 | 402908 | 1 | 266 |
| 5UTR-45709 | 402914 | 1 | 462 |
| 5UTR-45710 | 402918 | 1 | 786 |
| 5UTR-45711 | 402921 | 1 | 79 |
| 5UTR-45712 | 402922 | 1 | 140 |
| 5UTR-45713 | 402924 | 1 | 163 |
| 5UTR-45714 | 402924 | 1 | 177 |
| 5UTR-45715 | 402928 | 1 | 131 |
| 5UTR-45716 | 402937 | 1 | 156 |
| 5UTR-45717 | 402938 | 1 | 59 |
| 5UTR-45718 | 402938 | 1 | 134 |
| 5UTR-45719 | 402939 | 1 | 526 |
| 5UTR-45720 | 402943 | 1 | 318 |
| 5UTR-45721 | 402951 | 1 | 21 |
| 5UTR-45722 | 402965 | 1 | 184 |
| 5UTR-45723 | 402966 | 1 | 85 |
| 5UTR-45724 | 402971 | 1 | 60 |
| 5UTR-45725 | 402983 | 1 | 238 |
| 5UTR-45726 | 402984 | 1 | 103 |
| 5UTR-45727 | 402988 | 1 | 16 |
| 5UTR-45728 | 402989 | 1 | 401 |
| 5UTR-45729 | 402997 | 1 | 95 |
| 5UTR-45730 | 403018 | 1 | 43 |
| 5UTR-45731 | 403018 | 1 | 743 |
| 5UTR-45732 | 403026 | 1 | 61 |
| 5UTR-45733 | 403027 | 1 | 251 |
| 5UTR-45734 | 403027 | 1 | 372 |
| 5UTR-45735 | 403028 | 1 | 198 |
| 5UTR-45736 | 403050 | 1 | 452 |
| 5UTR-45737 | 403058 | 1 | 143 |
| 5UTR-45738 | 403058 | 1 | 154 |
| 5UTR-45739 | 403059 | 1 | 299 |
| 5UTR-45740 | 403078 | 1 | 127 |
| 5UTR-45741 | 403080 | 1 | 287 |
| 5UTR-45742 | 403080 | 1 | 328 |
| 5UTR-45743 | 403084 | 1 | 827 |
| 5UTR-45744 | 403084 | 1 | 873 |
| 5UTR-45745 | 403092 | 1 | 34 |
| 5UTR-45746 | 403094 | 1 | 207 |
| 5UTR-45747 | 403097 | 1 | 781 |
| 5UTR-45748 | 403106 | 1 | 58 |
| 5UTR-45749 | 403106 | 1 | 79 |
| 5UTR-45750 | 403107 | 1 | 387 |
| 5UTR-45751 | 403131 | 1 | 133 |
| 5UTR-45752 | 403136 | 1 | 95 |
| 5UTR-45753 | 403160 | 1 | 46 |
| 5UTR-45754 | 403162 | 1 | 265 |
| 5UTR-45755 | 403166 | 1 | 103 |
| 5UTR-45756 | 403167 | 1 | 143 |
| 5UTR-45757 | 403172 | 1 | 278 |
| 5UTR-45758 | 403176 | 1 | 52 |
| 5UTR-45759 | 403197 | 1 | 144 |
| 5UTR-45760 | 403205 | 1 | 223 |
| 5UTR-45761 | 403206 | 1 | 180 |
| 5UTR-45762 | 403222 | 1 | 279 |
| 5UTR-45763 | 403230 | 1 | 75 |
| 5UTR-45764 | 403230 | 1 | 103 |
| 5UTR-45765 | 403245 | 1 | 97 |
| 5UTR-45766 | 403245 | 1 | 115 |
| 5UTR-45767 | 403251 | 1 | 270 |
| 5UTR-45768 | 403263 | 1 | 405 |
| 5UTR-45769 | 403273 | 1 | 59 |
| 5UTR-45770 | 403276 | 1 | 50 |
| 5UTR-45771 | 403290 | 1 | 355 |
| 5UTR-45772 | 403298 | 1 | 136 |
| 5UTR-45773 | 403299 | 1 | 3 |
| 5UTR-45774 | 403299 | 1 | 217 |
| 5UTR-45775 | 403303 | 1 | 142 |
| 5UTR-45776 | 403305 | 1 | 209 |
| 5UTR-45777 | 403312 | 1 | 219 |
| 5UTR-45778 | 403313 | 1 | 198 |
| 5UTR-45779 | 403321 | 1 | 172 |
| 5UTR-45780 | 403325 | 1 | 421 |
| 5UTR-45781 | 403346 | 1 | 284 |

[1155] To alter one or more properties of the polynucleotides, primary constructs or mmRNA of the invention, 5′UTRs which are heterologous to the coding region of the polynucleotides, primary constructs or mmRNA of the invention are engineered into compounds of the invention. The polynucleotides, primary constructs or mmRNA are then administered to cells, tissue or organisms and outcomes such as protein level, localization and/or half life are measured to evaluate the beneficial effects the heterologous 5′UTR may have on the polynucleotides, primary constructs or mmRNA of the invention. Variants of the 5′ UTRs may be utilized wherein one or more nucleotides are added or removed to the termini, including A, T, C or G. 5′UTRs may also be codon-optimized or modified in any manner described herein.

### Example 24

### Further Utilization of 5′ Untranslated Regions

[1156] A 5′ UTR may be provided as a flanking region to the polynucleotides, primary constructs or mmRNA of the invention. 5′UTR may be homologous or heterologous to the coding region found in the polynucleotides, primary constructs or mmRNA of the invention. Multiple 5′ UTRs may be included in the flanking region and may be the same or of different sequences. Any portion of the flanking regions, including none, may be codon optimized and any may independently contain one or more different structural or chemical modifications, before and/or after codon optimization.

[1157] Shown in Table 22 is a listing of 5′-untranslated regions of the invention.

[1158] To alter one or more properties of the polynucleotides, primary constructs or mmRNA of the invention, 5′UTRs which are heterologous to the coding region of the polynucleotides, primary constructs or mmRNA of the invention are engineered into compounds of the invention. The polynucleotides, primary constructs or mmRNA are then administered to cells, tissue or organisms and outcomes such as protein level, localization and/or half life are measured to evaluate the beneficial effects the heterologous 5′UTR may have on the polynucleotides, primary constructs or mmRNA of the invention. Variants of the 5′ UTRs may be utilized wherein one or more nucleotides are added or removed to the termini, including A, T, C or G. 5′UTRs may also be codon-optimized or modified in any manner described herein.

TABLE 22
5′-Untranslated Regions

| 5′ UTR | Name/ | | SEQ ID |
|---|---|---|---|
| Identifier | Description | Sequence | NO. |
| 5UTR- | Upstream | GGGAGATCAGAGAGAAAAGAAGAGTAAGAAGAAA | 4276 |
| 68512 | UTR | TATAAGAGCCACC | |
| 5UTR - | Upstream | GGAATAAAAGTCTCAACACAACATATACAAAACAA | 4277 |
| 68513 | UTR | ACGAATCTCAAGCAATCAAGCATTCTACTTCTATTG | |
| | | CAGCAATTTAAATCATTTCTTTTAAAGCAAAAGCAA | |
| | | TTTTCTGAAAATTTTCACCATTTACGAACGATAGCA | |
| | | AC | |
| 5UTR- | Upstream | GGGAGACAAGCUUGGCAUUCCGGUACUGUUGGUA | 4278 |
| 68514 | UTR | AAGCCACC | |
| 5UTR- | Upstream | GGGAATTAACAGAGAAAAGAAGAGTAAGAAGAAA | 4279 |
| 68515 | UTR | TATAAGAGCCACC | |
| 5UTR- | Upstream | GGGAAATTAGACAGAAAAGAAGAGTAAGAAGAAA | 4280 |
| 68516 | UTR | TATAAGAGCCACC | |
| 5UTR- | Upstream | GGGAAATAAGAGAGTAAAGAACAGTAAGAAGAAA | 4281 |
| 68517 | UTR | TATAAGAGCCACC | |
| 5UTR- | Upstream | GGGAAAAAAGAGAGAAAAGAAGACTAAGAAGAAA | 4282 |
| 68518 | UTR | TATAAGAGCCACC | |
| 5UTR- | Upstream | GGGAAATAAGAGAGAAAAGAAGAGTAAGAAGATA | 4283 |
| 68519 | UTR | TATAAGAGCCACC | |
| 5UTR- | Upstream | GGGAAATAAGAGACAAAACAAGAGTAAGAAGAAA | 4284 |
| 68520 | UTR | TATAAGAGCCACC | |
| 5UTR- | Upstream | GGGAAATTAGAGAGTAAAGAACAGTAAGTAGAATT | 4285 |
| 68521 | UTR | AAAAGAGCCACC | |
| 5UTR- | Upstream | GGGAAATAAGAGAGAATAGAAGAGTAAGAAGAAA | 4286 |
| 68522 | UTR | TATAAGAGCCACC | |
| 5UTR- | Upstream | GGGAAATAAGAGAGAAAAGAAGAGTAAGAAGAAA | 4287 |
| 68523 | UTR | ATTAAGAGCCACC | |
| 5UTR- | Upstream | GGGAAATAAGAGAGAAAAGAAGAGTAAGAAGAAA | 4288 |
| 68524 | UTR | TTTAAGAGCCACC | |

### Example 25

### Protein Production Using Heterologous 5′UTRs

[1159] The day before transfection, 20,000 HeLa cells (ATCC no. CCL-2; Manassas, Va.) were harvested by treatment with Trypsin-EDTA solution (LifeTechnologies, Grand Island, N.Y.) and seeded in a total volume of 100 ul EMEM medium (supplemented with 10% FCS and 1× Glutamax) per well in a 96-well cell culture plate (Corning, Manassas, Va.). The cells were grown at 37° C. in 5% CO₂ atmosphere overnight. The next day, 37.5 ng, 75 ng or 150 of G-CSF modified RNA comprising a nucleic acid sequence for 5UTR-001 (mRNA sequence shown in SEQ ID NO: 4289; polyA tail of approximately 140 nucleotides not shown in sequence; 5′cap, Cap1; fully modified with 5-methylcytosine and 1-methylpseudouridine), G-CSF modified RNA comprising a nucleic acid sequence for 5UTR-68515 (mRNA sequence shown in SEQ ID NO: 4290; polyA tail of approximately 140 nucleotides not shown in sequence; 5′cap, Cap1; fully modified with 5-methylcytosine and 1-methylpseudouridine), G-CSF modified RNA comprising a nucleic acid sequence for 5UTR-68516 (mRNA sequence shown in SEQ ID NO: 4291; polyA tail of approximately 140 nucleotides not shown in sequence; 5′cap, Cap1; fully modified with 5-methylcytosine and 1-methylpseudouridine), G-CSF modified RNA comprising a nucleic acid sequence for 5UTR-68521 (mRNA sequence shown in SEQ ID NO: 4292; polyA tail of approximately 140 nucleotides not shown in sequence; 5′cap, Cap1; fully modified with 5-methylcytosine and 1-methylpseudouridine) or G-CSF modified RNA comprising a nucleic acid sequence for 5UTR-68522 (mRNA sequence shown in SEQ ID NO: 4293; polyA tail of approximately 140 nucleotides not shown in sequence; 5′cap, Cap1; fully modified with 5-methylcytosine and 1-methylpseudouridine) were diluted in 10 ul final volume of OPTI-MEM (LifeTechnologies, Grand Island, N.Y.). Lipofectamine 2000 (LifeTechnologies, Grand Island, N.Y.) was used as transfection reagent and 0.2 ul were diluted in 10 ul final volume of OPTI-MEM. After 5 minutes of incubation at room temperature, both solutions were combined and incubated an additional 15 minute at room temperature. Then the 20 ul combined solution was added to the 100 ul cell culture medium containing the HeLa cells and incubated at room temperature.

[1160] After an incubation of 24 hours cells expressing G-CSF were lysed with 100 ul of Passive Lysis Buffer (Promega, Madison, Wis.) according to manufacturer instructions. G-CSF protein production was determined by ELISA.

[1161] These results, shown in Table 23, demonstrate that G-CSF mRNA comprising the 5UTR-68515 or 5UTR-68521 produced the most protein whereas G-CSF mRNA comprising 5UTR-68522 produced the least amount of protein.

TABLE 23
G-CSF Protein Production from Heterologous 5′UTRs

| | G-CSF Protein (ng/ml) | | |
|---|---|---|---|
| 5′UTR | 37.5 ng | 75 ng | 150 ng |
| 5UTR-001 | 131.3 | 191.1 | 696.1 |
| 5UTR-68515 | 245.6 | 394.3 | 850.3 |
| 5UTR-68516 | 188.6 | 397.4 | 719.6 |
| 5UTR-68521 | 191.4 | 449.1 | 892.1 |
| 5UTR-68522 | 135.9 | 331.3 | 595.6 |

### OTHER EMBODIMENTS

[1162] It is to be understood that the words which have been used are words of description rather than limitation, and that changes may be made within the purview of the appended claims without departing from the true scope and spirit of the invention in its broader aspects.

[1163] While the present invention has been described at some length and with some particularity with respect to the several described embodiments, it is not intended that it should be limited to any such particulars or embodiments or any particular embodiment, but it is to be construed with references to the appended claims so as to provide the broadest possible interpretation of such claims in view of the prior art and, therefore, to effectively encompass the intended scope of the invention.

[1164] All publications, patent applications, patents, and other references mentioned herein are incorporated by reference in their entirety. In case of conflict, the present specification, including definitions, will control. In addition, section headings, the materials, methods, and examples are illustrative only and not intended to be limiting.

1. A synthetic isolated RNA comprising:
(a) a first region of linked nucleosides encoding a polypeptide of interest;
(b) a first flanking region located at the 5′ terminus of said first region, wherein said first flanking region comprises a heterologous 5′UTR relative to the said first region of linked nucleosides encoding a polypeptide of interest, with the proviso that said heterologous 5′UTR is not derived from the beta-globin gene;
(c) a second flanking region located at the 3′ terminus of said first region; and
(d) a 3′ tailing region of linked nucleosides.

2. The synthetic isolated RNA of claim 1 wherein any of the regions (a)-(d) comprise at least one modified nucleoside.

3. The synthetic isolated RNA of claim 1, wherein the first flanking region comprises a heterologous 5′ untranslated region (UTR) selected from the group consisting of 5′UTR-005-5′UTR 68524.

4. The synthetic isolated RNA of claim 3, wherein the first flanking region comprises at least one 5′ cap structure.

5. The synthetic isolated RNA of claim 4, wherein the at least one 5′ cap structure is selected from the group consisting of Cap0, Cap1, ARCA, inosine, N1-methyl-guanosine, 2′fluoro-guanosine, 7-deaza-guanosine, 8-oxo-guanosine, 2-amino-guanosine, LNA-guanosine, 2-azido-guanosine, Cap2 and Cap4.

6. The synthetic isolated RNA of claim 3, wherein the first flanking region comprises a translation initiation sequence selected from the group consisting of Kozak sequence and an internal ribosome entry site (IRES).

7. The synthetic isolated RNA of claim 1, wherein the second flanking region comprises a 3′ UTR.

8. The synthetic isolated RNA of claim 7, wherein the 3′UTR is the native 3′UTR of the encoded polypeptide of interest.

9. The synthetic isolated RNA of claim 1, wherein the second flanking region comprises at least one sensor region.

10. The synthetic isolated RNA of claim 9, wherein the at least one sensor region is at least one miR binding site selected from the group consisting of SEQ ID NOs: 1188-2208 and 3230-4250.

11. The synthetic isolated RNA of claim 9, wherein the at least one sensor region is at least one miR binding site and wherein the at least one miR binding site lacks a miR seed.

12. The synthetic isolated RNA of claim 11, wherein the at least one miR binding site is one which binds miR-122.

13. The synthetic isolated terminally optimized RNA of claim 9, wherein the second flanking region comprises four sensor regions.

14. The synthetic isolated RNA of claim 1, wherein the 3′ tailing region is selected from the group consisting of a PolyA tail, PolyA-G quartet and a triple helix.

15. The synthetic isolated RNA of claim 14, wherein the 3′ tailing region is a PolyA tail.

16. The synthetic isolated RNA of claim 1, wherein the first flanking region comprises a structured untranslated region.

17. A method of producing a protein of interest comprising contacting a mammalian cell, tissue or organ with the synthetic isolated RNA of claim 1.

18. A pharmaceutical composition comprising the synthetic isolated RNA of claim 1 and a pharmaceutically acceptable excipient.

The application's sequence listing, which the Patent Office published only in electronic form, follows.

SEQUENCE LISTING (4293 sequences)

SEQ ID NO: 1 - DNA, 10 bp, Homo sapiens
tttttctttt

SEQ ID NO: 2 - DNA, 11 bp, Homo sapiens
ttttgcttttt

SEQ ID NO: 3 - DNA, 10 bp, Homo sapiens
ttttgctttt

SEQ ID NO: 4 - DNA, 11 bp, Homo sapiens
aaaaagcaaaa

SEQ ID NO: 5 - DNA, 47 bp, Homo sapiens
gggaaataagagagaaaagaagagtaagaagaaatataagagccacc

SEQ ID NO: 6 - DNA, 371 bp, Homo sapiens
gcgcctgcccacctgccaccgactgctggaacccagccagtgggagggcctggcccaccagagtcctgctccctcactcctcgccccgccccctgtcccagagtcccacctgggggctctctccacccttctcagagttccagtttcaaccagagttccaaccaatgggctccatcctctggattctggccaatgaaatatctccctggcagggtcctcttcttttcccagagctccaccccaaccaggagctctagttaatggagagctcccagcacactcggagcttgtgctttgtctccacgcaaagcgataaataaaagcattggtggcctttggtctttgaataaagcctgagtaggaagtctaga

SEQ ID NO: 7 - DNA, 568 bp, Homo sapiens
gcccctgccgctcccacccccacccatctgggccccgggttcaagagagagcggggtctgatctcgtgtagccatatagagtttgcttctgagtgtctgctttgtttagtagaggtgggcaggaggagctgaggggctggggctggggtgttgaagttggctttgcatgcccagcgatgcgcctccctgtgggatgtcatcaccctgggaaccgggagtggcccttggctcactgtgttctgcatggtttggatctgaattaattgtcctttcttctaaatcccaaccgaacttcttccaacctccaaactggctgtaaccccaaatccaagccattaactacacctgacagtagcaattgtctgattaatcactggccccttgaagacagcagaatgtccctttgcaatgaggaggagatctgggctgggcgggccagctggggaagcatttgactatctggaacttgtgtgtgcctcctcaggtatggcagtgactcacctggttttaataaaacaacctgcaacatctcatggtctttgaataaagcctgagtaggaagtctaga

SEQ ID NO: 8 - DNA, 289 bp, Homo sapiens
acacactccacctccagcacgcgacttctcaggacgacgaatcttctcaatgggggggcggctgagctccagccaccccgcagtcactttctttgtaacaacttccgttgctgccatcgtaaactgacacagtgtttataacgtgtacatacattaacttattacctcattttgttatttttcgaaacaaagccctgtggaagaaaatggaaaacttgaagaagcattaaagtcattctgttaagctgcgtaaatggtctttgaataaagcctgagtaggaagtctaga

SEQ ID NO: 9 - DNA, 379 bp, Homo sapiens
catcacatttaaaagcatctcagcctaccatgagaataagagaaagaaaatgaagatcaaaagcttattcatctgtttttctttttcgttggtgtaaagccaacaccctgtctaaaaaacataaatttctttaatcattttgcctcttttctctgtgcttcaattaataaaaaatggaaagaatctaatagagtggtacagcactgttatttttcaaagatgtgttgctatcctgaaaattctgtaggttctgtggaagttccagtgttctctcttattccacttcggtagaggatttctagtttcttgtgggctaattaaataaatcattaatactcttctaatggtctttgaataaagcctgagtaggaagtctaga

SEQ ID NO: 10 - DNA, 118 bp, Mus. sp.
gctgccttctgcggggcttgccttctggccatgcccttcttctctcccttgcacctgtacctcttggtctttgaataaagcctgagtaggaaggcggccgctcgagcatgcatctaga

SEQ ID NO: 11 - DNA, 908 bp, Homo sapiens
gccaagccctccccatcccatgtatttatctctatttaatatttatgtctatttaagcctcatatttaaagacagggaagagcagaacggagccccaggcctctgtgtccttccctgcatttctgagtttcattctcctgcctgtagcagtgagaaaaagctcctgtcctcccatcccctggactgggaggtagataggtaaataccaagtatttattactatgactgctccccagccctggctctgcaatgggcactgggatgagccgctgtgagcccctggtcctgagggtccccacctgggacccttgagagtatcaggtctcccacgtgggagacaagaaatccctgtttaatatttaaacagcagtgttccccatctgggtccttgcacccctcactctggcctcagccgactgcacagcggcccctgcatccccttggctgtgaggcccctggacaagcagaggtggccagagctgggaggcatggccctggggtcccacgaatttgctggggaatctcgtttttcttcttaagacttttgggacatggtttgactcccgaacatcaccgacgcgtctcctgtttttctgggtggcctcgggacacctgccctgcccccacgagggtcaggactgtgactctttttagggccaggcaggtgcctggacatttgccttgctggacggggactggggatgtgggagggagcagacaggaggaatcatgtcaggcctgtgtgtgaaaggaagctccactgtcaccctccacctcttcaccccccactcaccagtgtcccctccactgtcacattgtaactgaacttcaggataataaagtgtttgcctccatggtctttgaataaagcctgagtaggaaggcggccgctcgagcatgcatctaga

SEQ ID NO: 12 - DNA, 835 bp, Homo sapiens
actcaatctaaattaaaaaagaaagaaatttgaaaaaactttctctttgccatttcttcttcttcttttttaactgaaagctgaatccttccatttcttctgcacatctacttgcttaaattgtgggcaaaagagaaaaagaaggattgatcagagcattgtgcaatacagtttcattaactccttcccccgctcccccaaaaatttgaatttttttttcaacactcttacacctgttatggaaaatgtcaacctttgtaagaaaaccaaaataaaaattgaaaaataaaaaccataaacatttgcaccacttgtggcttttgaatatcttccacagagggaagtttaaaacccaaacttccaaaggtttaaactacctcaaaacactttcccatgagtgtgatccacattgttaggtgctgacctagacagagatgaactgaggtccttgttttgttttgttcataatacaaaggtgctaattaatagtatttcagatacttgaagaatgttgatggtgctagaagaatttgagaagaaatactcctgtattgagttgtatcgtgtggtgtattttttaaaaaatttgatttagcattcatattttccatcttattcccaattaaaagtatgcagattatttgcccaaatcttcttcagattcagcatttgttctttgccagtctcattttcatcttcttccatggttccacagaagctttgtttcttgggcaagcagaaaaattaaattgtacctattttgtatatgtgagatgtttaaataaattgtgaaaaaaatgaaataaagcatgtttggttttccaaaagaacatat

SEQ ID NO: 13 - DNA, 297 bp, Homo sapiens
cgccgccgcccgggccccgcagtcgagggtcgtgagcccaccccgtccatggtgctaagcgggcccgggtcccacacggccagcaccgctgctcactcggacgacgccctgggcctgcacctctccagctcctcccacggggtccccgtagccccggcccccgcccagccccaggtctccccaggccctccgcaggctgcccggcctccctccccctgcagccatcccaaggctcctgacctacctggcccctgagctctggagcaagccctgacccaataaaggctttgaacccat

SEQ ID NO: 14 - DNA, 602 bp, Homo sapiens
ggggctagagccctctccgcacagcgtggagacggggcaaggaggggggttattaggattggtggttttgttttgctttgtttaaagccgtgggaaaatggcacaactttacctctgtgggagatgcaacactgagagccaaggggtgggagttgggataatttttatataaaagaagtttttccactttgaattgctaaaagtggcatttttcctatgtgcagtcactcctctcatttctaaaatagggacgtggccaggcacggtggctcatgcctgtaatcccagcactttgggaggccgaggcaggcggctcacgaggtcaggagatcgagactatcctggctaacacggtaaaaccctgtctctactaaaagtacaaaaaattagctgggcgtggtggtgggcacctgtagtcccagctactcgggaggctgaggcaggagaaaggcatgaatccaagaggcagagcttgcagtgagctgagatcacgccattgcactccagcctgggcaacagtgttaagactctgtctcaaatataaataaataaataaataaataaataaataaataaaaataaagcgagatgttgccctcaaa

SEQ ID NO: 15 - DNA, 785 bp, Homo sapiens
ggccctgccccgtcggactgcccccagaaagcctcctgccccctgccagtgaagtccttcagtgagcccctccccagccagcccttccctggccccgccggatgtataaatgtaaaaatgaaggaattacattttatatgtgagcgagcaagccggcaagcgagcacagtattatttctccatcccctccctgcctgctccttggcacccccatgctgccttcagggagacaggcagggagggcttggggctgcacctcctaccctcccaccagaacgcaccccactgggagagctggtggtgcagccttcccctccctgtataagacactttgccaaggctctcccctctcgccccatccctgcttgcccgctcccacagcttcctgagggctaattctgggaagggagagttctttgctgcccctgtctggaagacgtggctctgggtgaggtaggcgggaaaggatggagtgttttagttcttgggggaggccaccccaaaccccagccccaactccaggggcacctatgagatggccatgctcaacccccctcccagacaggccctccctgtctccagggcccccaccgaggttcccagggctggagacttcctctggtaaacattcctccagcctcccctcccctggggacgccaaggaggtgggccacacccaggaagggaaagcgggcagccccgttttggggacgtgaacgttttaataatttttgctgaattcctttacaactaaataacacagatattgttataaataaaattgt

SEQ ID NO: 16 - DNA, 3001 bp, Homo sapiens
atattaaggatcaagctgttagctaataatgccacctctgcagttttgggaacaggcaaataaagtatcagtatacatggtgatgtacatctgtagcaaagctcttggagaaaatgaagactgaagaaagcaaagcaaaaactgtatagagagatttttcaaaagcagtaatccctcaattttaaaaaaggattgaaaattctaaatgtctttctgtgcatattttttgtgttaggaatcaaaagtattttataaaaggagaaagaacagcctcattttagatgtagtcctgttggattttttatgcctcctcagtaaccagaaatgttttaaaaaactaagtgtttaggatttcaagacaacattatacatggctctgaaatatctgacacaatgtaaacattgcaggcacctgcattttatgttttttttttcaacaaatgtgactaatttgaaacttttatgaacttctgagctgtccccttgcaattcaaccgcagtttgaattaatcatatcaaatcagttttaattttttaaattgtacttcagagtctatatttcaagggcacattttctcactactattttaatacattaaaggactaaataatctttcagagatgctggaaacaaatcatttgctttatatgtttcattagaataccaatgaaacatacaacttgaaaattagtaatagtatttttgaagatcccatttctaattggagatctctttaatttcgatcaacttataatgtgtagtactatattaagtgcacttgagtggaattcaacatttgactaataaaatgagttcatcatgttggcaagtgatgtggcaattatctctggtgacaaaagagtaaaatcaaatatttctgcctgttacaaatatcaaggaagacctgctactatgaaatagatgacattaatctgtcttcactgtttataatacggatggattttttttcaaatcagtgtgtgttttgaggtcttatgtaattgatgacatttgagagaaatggtggctttttttagctacctctttgttcatttaagcaccagtaaagatcatgtctttttatagaagtgtagattttctttgtgactttgctatcgtgcctaaagctctaaatataggtgaatgtgtgatgaatactcagattatttgtctctctatataattagtttggtactaagtttctcaaaaaattattaacacatgaaagacaatctctaaaccagaaaaagaagtagtacaaattttgttactgtaatgctcgcgtttagtgagtttaaaacacacagtatcttttggttttataatcagtttctattttgctgtgcctgagattaagatctgtgtatgtgtgtgtgtgtgtgtgtgcgtttgtgtgttaaagcagaaaagacttttttaaaagttttaagtgataaatgcaatttgttaattgatcttagatcactagtaaactcagggctgaattataccatgtatattctattagaagaaagtaaacaccatctttattcctgccctttttcttctctcaaagtagttgtagttatatctagaaagaagcaattttgatttcttgaaaaggtagttcctgcactcagtttaaactaaaaataatcatacttggattttatttatttttgtcatagtaaaaattttaatttatatatatttttatttagtattatcttattctttgctatttgccaatcctttgtcatcaattgtgttaaatgaattgaaaattcatgccctgttcattttattttactttattggttaggatatttaaaggatttttgtatatataatttcttaaattaatattccaaaaggttagtggacttagattataaattatggcaaaaatctaaaaacaacaaaaatgatttttatacattctatttcattattcctctttttccaataagtcatacaattggtagatatgacttattttatttttgtattattcactatatctttatgatatttaagtataaataattaaaaaaatttattgtaccttatagtctgtcaccaaaaaaaaaaaattatctgtaggtagtgaaatgctaatgttgatttgtctttaagggcttgttaactatcctttattttctcatttgtcttaaattaggagtttgtgtttaaattactcatctaagcaaaaaatgtatataaatcccattactgggtatatacccaaaggattataaatcatgctgctataaagacacatgcacacgtatgtttattgcagcactattcacaatagcaaagacttggaaccaacccaaatgtccatcaatgatagacttgattaagaaaatgtgcacatatacaccatggaatactatgcagccataaaaaaggatgagttcatgtcctttgtagggacatggataaagctggaaaccatcattctgagcaaactattgcaaggacagaaaaccaaacactgcatgttctcactcataggtgggaattgaacaatgagaacacttggacacaaggtggggaacaccacacaccagggcctgtcatggggtggggggagtggggagggatagcattaggagatatacctaatgtaaatgatgagttaatgggtgcagcacaccaacatggcacatgtatacatatgtagcaaacctgcacgttgtgcacatgtaccctagaacttaaagtataattaaaaaaaaaaagaaaacagaagctatttataaagaagttatttgctgaaataaatgtgatctttcccattaaaaaaataaagaaattttggggtaaaaaaacacaatatattgtattcttgaaaaattctaagagagtggatgtgaagtgttctcaccacaaaagtgataactaattgaggtaatgcacatattaattagaaagattttgtcattccacaatgtatatatacttaaaaatatgttatacacaataaatacatacattaaaaaataagtaaatgta

SEQ ID NO: 17 - DNA, 1037 bp, Homo sapiens
cccaccctgcacgccggcaccaaaccctgtcctcccacccctccccactcatcactaaacagagtaaaatgtgatgcgaattttcccgaccaacctgattcgctagattttttttaaggaaaagcttggaaagccaggacacaacgctgctgcctgctttgtgcagggtcctccggggctcagccctgagttggcatcacctgcgcagggccctctggggctcagccctgagctagtgtcacctgcacagggccctctgaggctcagccctgagctggcgtcacctgtgcagggccctctggggctcagccctgagctggcctcacctgggttccccaccccgggctctcctgccctgccctcctgcccgccctccctcctgcctgcgcagctccttccctaggcacctctgtgctgcatcccaccagcctgagcaagacgccctctcggggcctgtgccgcactagcctccctctcctctgtccccatagctggtttttcccaccaatcctcacctaacagttactttacaattaaactcaaagcaagctcttctcctcagcttggggcagccattggcctctgtctcgttttgggaaaccaaggtcaggaggccgttgcagacataaatctcggcgactcggccccgtctcctgagggtcctgctggtgaccggcctggaccttggccctacagccctggaggccgctgctgaccagcactgaccccgacctcagagagtactcgcaggggcgctggctgcactcaagaccctcgagattaacggtgctaaccccgtctgctcctccctcccgcagagactggggcctggactggacatgagagccccttggtgccacagagggctgtgtcttactagaaacaacgcaaacctctccttcctcagaatagtgatgtgttcgacgttttatcaaaggccccctttctatgttcatgttagttttgctccttctgtgtttttttctgaaccatatccatgttgctgacttttccaaataaaggttttcactcctctc

SEQ ID NO: 18 - DNA, 577 bp, Homo sapiens
agaggcctgcctccagggctggactgaggcctgagcgctcctgccgcagagctggccgcgccaaataatgtctctgtgagactcgagaactttcatttttttccaggctggttcggatttggggtggattttggttttgttcccctcctccactctcccccaccccctccccgcccttttttttttttttttttaaactggtattttatctttgattctccttcagccctcacccctggttctcatctttcttgatcaacatcttttcttgcctctgtccccttctctcatctcttagctcccctccaacctggggggcagtggtgtggagaagccacaggcctgagatttcatctgctctccttcctggagcccagaggagggcagcagaagggggtggtgtctccaaccccccagcactgaggaagaacggggctcttctcatttcacccctccctttctcccctgcccccaggactgggccacttctgggtggggcagtgggtcccagattggctcacactgagaatgtaagaactacaaacaaaatttctattaaattaaattttgtgtctcc

SEQ ID NO: 19 - DNA, 2212 bp, Homo sapiens
ctccctccatcccaacctggctccctcccacccaaccaactttccccccaacccggaaacagacaagcaacccaaactgaaccccctcaaaagccaaaaaatgggagacaatttcacatggactttggaaaatatttttttcctttgcattcatctctcaaacttagtttttatctttgaccaaccgaacatgaccaaaaaccaaaagtgcattcaaccttaccaaaaaaaaaaaaaaaaaaagaataaataaataactttttaaaaaaggaagcttggtccacttgcttgaagacccatgcgggggtaagtccctttctgcccgttgggcttatgaaaccccaatgctgccctttctgctcctttctccacaccccccttggggcctcccctccactccttcccaaatctgtctccccagaagacacaggaaacaatgtattgtctgcccagcaatcaaaggcaatgctcaaacacccaagtggcccccaccctcagcccgctcctgcccgcccagcacccccaggccctgggggacctggggttctcagactgccaaagaagccttgccatctggcgctcccatggctcttgcaacatctccccttcgtttttgagggggtcatgccgggggagccaccagcccctcactgggttcggaggagagtcaggaagggccacgacaaagcagaaacatcggatttggggaacgcgtgtcaatcccttgtgccgcagggctgggcgggagagactgttctgttccttgtgtaactgtgttgctgaaagactacctcgttcttgtcttgatgtgtcaccggggcaactgcctgggggcggggatgggggcagggtggaagcggctccccattttataccaaaggtgctacatctatgtgatgggtggggtggggagggaatcactggtgctatagaaattgagatgcccccccaggccagcaaatgttcctttttgttcaaagtctatttttattccttgatatttttctttttttttttttttttttgtggatggggacttgtgaatttttctaaaggtgctatttaacatgggaggagagcgtgtgcggctccagcccagcccgctgctcactttccaccctctctccacctgcctctggcttctcaggcctctgctctccgacctctctcctctgaaaccctcctccacagctgcagcccatcctcccggctccctcctagtctgtcctgcgtcctctgtccccgggtttcagagacaacttcccaaagcacaaagcagtttttccccctaggggtgggaggaagcaaaagactctgtacctattttgtatgtgtataataatttgagatgtttttaattattttgattgctggaataaagcatgtggaaatgacccaaacataatccgcagtggcctcctaatttccttctttggagttgggggaggggtagacatggggaaggggctttggggtgatgggcttgccttccattcctgccctttccctccccactattctcttctagatccctccataaccccactcccctttctctcacccttcttataccgcaaacctttctacttcctctttcattttctattcttgcaatttccttgcaccttttccaaatcctcttctcccctgcaataccatacaggcaatccacgtgcacaacacacacacacactcttcacatctggggttgtccaaacctcatacccactccccttcaagcccatccactctccaccccctggatgccctgcacttggtggcggtgggatgctcatggatactgggagggtgaggggagtggaacccgtgaggaggacctgggggcctctccttgaactgacatgaagggtcatctggcctctgctcccttctcacccacgctgacctcctgccgaaggagcaacgcaacaggagaggggtctgctgagcctggcgagggtctgggagggaccaggaggaaggcgtgctccctgctcgctgtcctggccctgggggagtgagggagacagacacctgggagagctgtggggaaggcactcgcaccgtgctcttgggaaggaaggagacctggccctgctcaccacggactgggtgcctcgacctcctgaatccccagaacacaacccccctgggctggggtggtctggggaaccatcgtgcccccgcctcccgcctactcctttttaagctt

SEQ ID NO: 20 - DNA, 729 bp, Homo sapiens
ttggccaggcctgaccctcttggacctttcttctttgccgacaaccactgcccagcagcctctgggacctcggggtcccagggaacccagtccagcctcctggctgttgacttcccattgctcttggagccaccaatcaaagagattcaaagagattcctgcaggccagaggcggaacacacctttatggctggggctctccgtggtgttctggacccagcccctggagacaccattcacttttactgctttgtagtgactcgtgctctccaacctgtcttcctgaaaaaccaaggcccccttcccccacctcttccatggggtgagacttgagcagaacaggggcttccccaagttgcccagaaagactgtctgggtgagaagccatggccagagcttctcccaggcacaggtgttgcaccagggacttctgcttcaagttttggggtaaagacacctggatcagactccaagggctgccctgagtctgggacttctgcctccatggctggtcatgagagcaaaccgtagtcccctggagacagcgactccagagaacctcttgggagacagaagaggcatctgtgcacagctcgatcttctacttgcctgtggggaggggagtgacaggtccacacaccacactgggtcaccctgtcctggatgcctctgaagagagggacagaccgtcagaaactggagagtttctattaaaggtcatttaaacca

SEQ ID NO: 21 - DNA, 847 bp, Homo sapiens
tcctccgggaccccagccctcaggattcctgatgctccaaggcgactgatgggcgctggatgaagtggcacagtcagcttccctgggggctggtgtcatgttgggctcctggggcgggggcacggcctggcatttcacgcattgctgccaccccaggtccacctgtctccactttcacagcctccaagtctgtggctcttcccttctgtcctccgaggggcttgccttctctcgtgtccagtgaggtgctcagtgatcggcttaacttagagaagcccgccccctccccttctccgtctgtcccaagagggtctgctctgagcctgcgttcctaggtggctcggcctcagctgcctgggttgtggccgccctagcatcctgtatgcccacagctactggaatccccgctgctgctccgggccaagcttctggttgattaatgagggcatggggtggtccctcaagaccttcccctaccttttgtggaaccagtgatgcctcaaagacagtgtcccctccacagctgggtgccaggggcaggggatcctcagtatagccggtgaaccctgataccaggagcctgggcctccctgaacccctggcttccagccatctcatcgccagcctcctcctggacctcttggcccccagccccttccccacacagccccagaagggtcccagagctgaccccactccaggacctaggcccagcccctcagcctcatctggagcccctgaagaccagtcccacccacctttctggcctcatctgacactgctccgcatcctgctgtgtgtcctgttccatgttccggttccatccaaatacactttctggaacaaa

SEQ ID NO: 22 - DNA, 27 bp, Homo sapiens
ttggaccctcgtacagaagctaatacg

SEQ ID NO: 23 - DNA, 189 bp, Homo sapiens
ttttttttttttttttttttttttttttttttttttttttttttttttttttttttttttttttttttttttttttttttttttttttttttttttttttttttttttttttttttttttttttttttttttttttttttttttttttttttttttttttcttcctactcaggctttattcaaagacca

SEQ ID NO: 24 - DNA, 20 bp, Homo sapiens
ccttgaccttctggaacttc

SEQ ID NO: 25 - DNA, 20 bp, Homo sapiens
ccaagcactgaaacggatat

SEQ ID NO: 26 - DNA, 20 bp, Homo sapiens
gatgaaaagtgctccaagga

SEQ ID NO: 27 - DNA, 20 bp, Homo sapiens
aaccgtgatgaaaaggtacc

SEQ ID NO: 28 - DNA, 20 bp, Homo sapiens
tcatgcagattggaaaggtc

SEQ ID NO: 29 - DNA, 20 bp, Homo sapiens
cttcttggactgtccagagg

SEQ ID NO: 30 - DNA, 20 bp, Homo sapiens
gcagtccctgatacaagaac

SEQ ID NO: 31 - DNA, 20 bp, Homo sapiens
gattgaaggtggctcgctac

SEQ ID NO: 32 - DNA, 75 bp, Homo sapiens
atgatgccatcctcagtctcatggggtattttgctcttggcgggtctgtgctgtctcgtgccggtgtcgctcgca

SEQ ID NO: 33 - DNA, 90 bp, Homo sapiens
atggccggaccggcgactcagtcgcccatgaaactcatggccctgcagttgttgctttggcactcagccctctggaccgtccaagaggcg

SEQ ID NO: 34 - DNA, 137 bp, Homo sapiens
atgcagagagtgaacatgattatggccgagtccccatcgctcatcacaatctgcctgcttggtacctgctttccgccgaatgcactgtctttctggatcacgagaatgcgaataagatcttgaaccgacccaaacgg

SEQ ID NO: 35 - DNA, 63 bp, Homo sapiens
atgaaaggatcattgctgttgctcctcgtgtcgaaccttctgctttgccagtccgtagccccc

SEQ ID NO: 36 - DNA, 72 bp, Homo sapiens
atgaaatgggtgacgttcatctcactgttgtttttgttctcgtccgcctactccaggggagtattccgccga

SEQ ID NO: 37 - DNA, 63 bp, Homo sapiens
atgtggtggcggctctggtggctgctcctgttgctcctcttgctgtggcccatggtgtgggca

SEQ ID NO: 38 - DNA, 95 bp, Homo sapiens
tgctctttaacctccgcatcctgttgaataacgctgcgttccgaaatgggcataacttcatggtacgcaacttcagatgcggccagccactccag

SEQ ID NO: 39 - DNA, 87 bp, Homo sapiens
atgtccgtcttgacacccctgctcttgagagggctgacggggtccgctagacgcctgccggtaccgcgagcgaagatccactccctg

SEQ ID NO: 40 - DNA, 87 bp, Homo sapiens
atgagcgtgctcactccgttgcttcttcgagggcttacgggatcggctcggaggttgcccgtcccgagagcgaagatccattcgttg

SEQ ID NO: 41 - DNA, 175 bp, Artificial Sequence
  Description of Artificial Sequence: Bacterial Signal Sequence
tgacaaaaataactttatctccccagaattttagaatccaaaaacaggaaaccacactactaaaagaaaaatcaaccgagaaaaattctttagcaaaaagtattctcgcagtaaaaatcacttcatcgaattaaggtcaaaattatcggaacgttttatttcgcataagaacact

SEQ ID NO: 42 - DNA, 69 bp, Artificial Sequence
  Description of Artificial Sequence: Viral Signal Sequence
atgctgagctttgtggatacccgcaccctgctgctgctggcggtgaccagctgcctggcgacctgccag

SEQ ID NO: 43 - DNA, 96 bp, Artificial Sequence
  Description of Artificial Sequence: Viral Signal Sequence
atgggcagcagccaggcgccgcgcatgggcagcgtgggcggccatggcctgatggcgctgctgatggcgggcctgattctgccgggcattctggcg

SEQ ID NO: 44 - DNA, 51 bp, Artificial Sequence
  Description of Artificial Sequence: Viral Signal Sequence
atggcgggcattttttattttctgtttagctttctgtttggcatttgcgat

SEQ ID NO: 45 - DNA, 66 bp, Artificial Sequence
  Description of Artificial Sequence: Viral Signal Sequence
atggaaaaccgcctgctgcgcgtgtttctggtgtgggcggcgctgaccatggatggcgcgagcgcg

SEQ ID NO: 46 - DNA, 81 bp, Artificial Sequence
  Description of Artificial Sequence: Viral Signal Sequence
atggcgcgccagggctgctttggcagctatcaggtgattagcctgtttacctttgcgattggcgtgaacctgtgcctgggc

SEQ ID NO: 47 - DNA, 57 bp, Artificial Sequence
  Description of Artificial Sequence: Bacterial Signal Sequence
atgagccgcctgccggtgctgctgctgctgcagctgctggtgcgcccgggcctgcag

SEQ ID NO: 48 - DNA, 87 bp, Artificial Sequence
  Description of Artificial Sequence: Bacterial Signal Sequence
atgaaacagcagaaacgcctgtatgcgcgcctgctgaccctgctgtttgcgctgatttttctgctgccgcatagcagcgcgagcgcg

SEQ ID NO: 49 - DNA, 78 bp, Homo sapiens
atggcgacgccgctgcctccgccctccccgcggcacctgcggctgctgcggctgctgctctccgccctcgtcctcggc

SEQ ID NO: 50 - DNA, 54 bp, Homo sapiens
atgaaggctccgggtcggctcgtgctcatcatcctgtgctccgtggtcttctct

SEQ ID NO: 51 - DNA, 45 bp, Homo sapiens
atgcttcagctttggaaacttgttctcctgtgcggcgtgctcact

SEQ ID NO: 52 - DNA, 39 bp, Homo sapiens
atgctttatctccagggttggagcatgcctgctgtggca

SEQ ID NO: 53 - DNA, 144 bp, Homo sapiens
atggataacgtgcagccgaaaataaaacatcgccccttctgcttcagtgtgaaaggccacgtgaagatgctgcggctggatattatcaactcactggtaacaacagtattcatgctcatcgtatctgtgttggcactgatacca

SEQ ID NO: 54 - DNA, 96 bp, Homo sapiens
atgccctgcctagaccaacagctcactgttcatgccctaccctgccctgcccagccctcctctctggccttctgccaagtggggttcttaacagca

SEQ ID NO: 55 - DNA, 138 bp, Homo sapiens
atgaaaaccttgttcaatccagcccctgccattgctgacctggatccccagttctacaccctctcagatgtgttctgctgcaatgaaagtgaggctgagattttaactggcctcacggtgggcagcgctgcagatgct

SEQ ID NO: 56 - DNA, 57 bp, Homo sapiens
atgaagcctctccttgttgtgtttgtctttcttttcctttgggatccagtgctggca

SEQ ID NO: 57 - DNA, 63 bp, Homo sapiens
atgtcctgttccctaaagtttactttgattgtaatttttttttactgttggctttcatccagc

SEQ ID NO: 58 - DNA, 210 bp, Homo sapiens
atggttcttactaaacctcttcaaagaaatggcagcatgatgagctttgaaaatgtgaaagaaaagagcagagaaggagggccccatgcacacacacccgaagaagaattgtgtttcgtggtaacacactaccctcaggttcagaccacactcaacctgtttttccatatattcaaggttcttactcaaccactttcccttctgtggggt

SEQ ID NO: 59 - DNA, 96 bp, Homo sapiens
atggccaccccgccattccggctgataaggaagatgttttccttcaaggtgagcagatggatggggcttgcctgcttccggtccctggcggcatcc

SEQ ID NO: 60 - DNA, 87 bp, Homo sapiens
atgagctttttccaactcctgatgaaaaggaaggaactcattcccttggtggtgttcatgactgtggcggcgggtggagcctcatct

SEQ ID NO: 61 - DNA, 123 bp, Homo sapiens
atggtctcagctctgcggggagcacccctgatcagggtgcactcaagccctgtttcttctccttctgtgagtggaccacggaggctggtgagctgcctgtcatcccaaagctcagctctgagc

SEQ ID NO: 62 - DNA, 60 bp, Homo sapiens
atgatggggtccccagtgagtcatctgctggccggcttctgtgtgtgggtcgtcttgggc

SEQ ID NO: 63 - DNA, 69 bp, Homo sapiens
atggcaagcatggctgccgtgctcacctgggctctggctcttctttcagcgttttcggccacccaggca

SEQ ID NO: 64 - DNA, 135 bp, Homo sapiens
atggtgctcatgtggaccagtggtgacgccttcaagacggcctacttcctgctgaagggtgcccctctgcagttctccgtgtgcggcctgctgcaggtgctggtggacctggccatcctggggcaggcctacgcc

SEQ ID NO: 65 - DNA, 204 bp, Homo sapiens
atggattttgtcgctggagccatcggaggcgtctgcggtgttgctgtgggctaccccctggacacggtgaaggtcaggatccagacggagccaaagtacacaggcatctggcactgcgtccgggatacgtatcaccgagagcgcgtgtggggcttctaccggggcctctcgctgcccgtgtgcacggtgtccctggtatcttcc

SEQ ID NO: 66 - DNA, 147 bp, Homo sapiens
atggagaagcccctcttcccattagtgcctttgcattggtttggctttggctacacagcactggttgtttctggtgggatcgttggctatgtaaaaacaggcagcgtgccgtccctggctgcagggctgctcttcggcagtctagcc

SEQ ID NO: 67 - DNA, 45 bp, Homo sapiens
atgggtctgctccttcccctggcactctgcatcctagtcctgtgc

SEQ ID NO: 68 - DNA, 78 bp, Homo sapiens
atggggatccagacgagccccgtcctgctggcctccctgggggtggggctggtcactctgctcggcctggctgtgggc

SEQ ID NO: 69 - DNA, 75 bp, Homo sapiens
atgtcggacctgctactactgggcctgattgggggcctgactctcttactgctgctgacgctgctagcctttgcc

SEQ ID NO: 70 - DNA, 87 bp, Homo sapiens
atggagactgtggtgattgttgccataggtgtgctggccaccatgtttctggcttcgtttgcagccttggtgctggtttgcaggcag

SEQ ID NO: 71 - DNA, 105 bp, Homo sapiens
atgcgcggctctgtggagtgcacctggggttgggggcactgtgcccccagccccctgctcctttggactctacttctgtttgcagccccatttggcctgctgggg

SEQ ID NO: 72 - DNA, 171 bp, Homo sapiens
atgatgccgtcccgtaccaacctggctactggaatccccagtagtaaagtgaaatattcaaggctctccagcacagacgatggctacattgaccttcagtttaagaaaacccctcctaagatcccttataaggccatcgcacttgccactgtgctgtttttgattggcgcc

SEQ ID NO: 73 - DNA, 108 bp, Homo sapiens
atggccctgccccagatgtgtgacgggagccacttggcctccaccctccgctattgcatgacagtcagcggcacagtggttctggtggccgggacgctctgcttcgct

SEQ ID NO: 74 - DNA, 63 bp, Artificial Sequence
  Description of Artificial Sequence: Bacterial Signal Sequence
tgaaaaagtggttcgttgctgccggcatcggcgctgccggactcatgctctccagcgccgcca

SEQ ID NO: 75 - DNA, 63 bp, Artificial Sequence
  Description of Artificial Sequence: Bacterial Signal Sequence
atgaaacagagcaccattgcgctggcgctgctgccgctgctgtttaccccggtgaccaaagcg

SEQ ID NO: 76 - DNA, 63 bp, Artificial Sequence
  Description of Artificial Sequence: Bacterial Signal Sequence
atgaaaaaaaccgcgattgcgattgcggtggcgctggcgggctttgcgaccgtggcgcaggcg

SEQ ID NO: 77 - DNA, 63 bp, Artificial Sequence
  Description of Artificial Sequence: Bacterial Signal Sequence
atgaaaaaactgatgctggcgattttttttagcgtgctgagctttccgagctttagccagagc

SEQ ID NO: 78 - DNA, 69 bp, Artificial Sequence
  Description of Artificial Sequence: Bacterial Signal Sequence
atgaaaaaaaacattgcgtttctgctggcgagcatgtttgtgtttagcattgcgaccaacgcgtatgcg

SEQ ID NO: 79 - DNA, 96 bp, Homo sapiens
atgtttgcgaaacgctttaaaaccagcctgctgccgctgtttgcgggctttctgctgctgtttcatctggtgctggcgggcccggcggcggcgagc

SEQ ID NO: 80 - DNA, 57 bp, Homo sapiens
atgcgctttccgagcatttttaccgcggtgctgtttgcggcgagcagcgcgctggcg

SEQ ID NO: 81 - DNA, 57 bp, Homo sapiens
atgcgctttccgagcatttttaccaccgtgctgtttgcggcgagcagcgcgctggcg

SEQ ID NO: 82 - DNA, 57 bp, Homo sapiens
atgcgctttccgagcatttttaccagcgtgctgtttgcggcgagcagcgcgctggcg

SEQ ID NO: 83 - DNA, 57 bp, Homo sapiens
atgcgctttccgagcatttttacccatgtgctgtttgcggcgagcagcgcgctggcg

SEQ ID NO: 84 - DNA, 57 bp, Homo sapiens
atgcgctttccgagcatttttaccattgtgctgtttgcggcgagcagcgcgctggcg

SEQ ID NO: 85 - DNA, 57 bp, Homo sapiens
atgcgctttccgagcatttttacctttgtgctgtttgcggcgagcagcgcgctggcg

SEQ ID NO: 86 - DNA, 57 bp, Homo sapiens
atgcgctttccgagcatttttaccgaagtgctgtttgcggcgagcagcgcgctggcg

SEQ ID NO: 87 - DNA, 57 bp, Homo sapiens
atgcgctttccgagcatttttaccggcgtgctgtttgcggcgagcagcgcgctggcg

SEQ ID NO: 88 - DNA, 63 bp, Homo sapiens
atgcgttcctcccccctcctccgctccgccgttgtggccgccctgccggtgttggcccttgcc

SEQ ID NO: 89 - DNA, 66 bp, Homo sapiens
atgggcgcggcggccgtgcgctggcacttgtgcgtgctgctggccctgggcacacgcgggcggctg

SEQ ID NO: 90 - DNA, 53 bp, Artificial Sequence
  Description of Artificial Sequence: Signal Sequence
atgaggagctcccttgtgctgttctttgtctctgcgtggacggccttggccag

SEQ ID NO: 91 - DNA, 96 bp, Homo sapiens
atgctcaggggtccgggacccgggcggctgctgctgctagcagtcctgtgcctggggacatcggtgcgctgcaccgaaaccgggaagagcaagagg

SEQ ID NO: 92 - DNA, 69 bp, Homo sapiens
atgcttaggggtccggggcccgggctgctgctgctggccgtccagctggggacagcggtgccctccacg

SEQ ID NO: 93 - DNA, 93 bp, Homo sapiens
atgcgccggggggccctgaccgggctgctcctggtcctgtgcctgagtgttgtgctacgtgcagccccctctgcaacaagcaagaagcgcagg

SEQ ID NO: 94 - protein, 24 aa, Homo sapiens
MMPSSVSWGILLAGLCCLVPVSLA

SEQ ID NO: 95 - protein, 30 aa, Homo sapiens
MAGPATQSPMKLMALQLLLWHSALWTVQEA

SEQ ID NO: 96 - protein, 46 aa, Homo sapiens
MQRVNMIMAESPSLITICLLGYLLSAECTVFLDHENANKILNRPKR

SEQ ID NO: 97 - protein, 21 aa, Homo sapiens
MKGSLLLLLVSNLLLCQSVAP

SEQ ID NO: 98 - protein, 24 aa, Homo sapiens
MKWVTFISLLFLFSSAYSRGVFRR

SEQ ID NO: 99 - protein, 19 aa, Homo sapiens
MWWRLWWLLLLLLLLPMWA

SEQ ID NO: 100 - protein, 32 aa, Homo sapiens
MLFNLRILLNNAAFRNGHNFMVRNFRCGQPLQ

SEQ ID NO: 101 - protein, 29 aa, Homo sapiens
MSVLTPLLLRGLTGSARRLPVPRAKIHSL

SEQ ID NO: 102 - protein, 29 aa, Homo sapiens
MSVLTPLLLRGLTGSARRLPVPRAKIHSL

SEQ ID NO: 103 - protein, 59 aa, Artificial Sequence
  Description of Artificial Sequence: Bacterial Signal Sequence
VTKITLSPQNFRIQKQETTLLKEKSTEKNSLAKSILAVKNHFIELRSKLSERFISHKNT

SEQ ID NO: 104 - protein, 23 aa, Artificial Sequence
  Description of Artificial Sequence: Viral Signal Sequence
MLSFVDTRTLLLLAVTSCLATCQ

SEQ ID NO: 105 - protein, 32 aa, Artificial Sequence
  Description of Artificial Sequence: Viral Signal Sequence
MGSSQAPRMGSVGGHGLMALLMAGLILPGILA

SEQ ID NO: 106 - protein, 17 aa, Artificial Sequence
  Description of Artificial Sequence: Viral Signal Sequence
MAGIFYFLFSFLFGICD

SEQ ID NO: 107 - protein, 22 aa, Artificial Sequence
  Description of Artificial Sequence: Viral Signal Sequence
MENRLLRVFLVWAALTMDGASA

SEQ ID NO: 108 - protein, 27 aa, Artificial Sequence
  Description of Artificial Sequence: Viral Signal Sequence
MARQGCFGSYQVISLFTFAIGVNLCLG

SEQ ID NO: 109 - protein, 19 aa, Artificial Sequence
  Description of Artificial Sequence: Bacterial Signal Sequence
MSRLPVLLLLQLLVRPGLQ

SEQ ID NO: 110 - protein, 29 aa, Artificial Sequence
  Description of Artificial Sequence: Bacterial Signal Sequence
MKQQKRLYARLLTLLFALIFLLPHSSASA

SEQ ID NO: 111 - protein, 22 aa, Homo sapiens
MATPLPPPSPRHLRLLRLLLSG

SEQ ID NO: 112 - protein, 18 aa, Homo sapiens
MKAPGRLVLIILCSVVFS

SEQ ID NO: 113 - protein, 13 aa, Homo sapiens
MLQLWKLLCGVLT

SEQ ID NO: 114 - protein, 13 aa, Homo sapiens
MLYLQGWSMPAVA

SEQ ID NO: 115 - protein, 48 aa, Homo sapiens
MDNVQPKIKHRPFCFSVKGHVKMLRLDIINSLVTTVFMLIVSVLALIP

SEQ ID NO: 116 - protein, 32 aa, Homo sapiens
MPCLDQQLTVHALPCPAQPSSLAFCQVGFLTA

SEQ ID NO: 117 - protein, 46 aa, Homo sapiens
MKTLFNPAPAIADLDPQFYTLSDVFCCNESEAEILTGLTVGSAADA

SEQ ID NO: 118 - protein, 19 aa, Homo sapiens
MKPLLVVFVFLFLWDPVLA

SEQ ID NO: 119 - protein, 21 aa, Homo sapiens [sequence omitted]

SEQ ID NO: 120 - protein, 70 aa, Homo sapiens
MVLTKPLQRNGSMMSFENVKEKSREGGPHAHTPEEELCFVVTHTPQVQTTLNLFFHIFKVLTQPLSLLWG

SEQ ID NO: 121 - protein, 32 aa, Homo sapiens
MATPPFRLIRKMFSFKVSRWMGLACFRSLAAS

SEQ ID NO: 122 - protein, 29 aa, Homo sapiens
MSFFQLLMKRKELIPLVVFMTVAAGGASS

SEQ ID NO: 123 - protein, 41 aa, Homo sapiens
MVSALRGAPLIRVHSSPVSSPSVSGPAALVSCLSSQSSALS

SEQ ID NO: 124 - protein, 20 aa, Homo sapiens
MMGSPVSHLLAGFCVWVVLG

SEQ ID NO: 125 - protein, 23 aa, Homo sapiens
MASMAAVLTWALALLSAFSATQA

SEQ ID NO: 126 - protein, 45 aa, Homo sapiens
MVLMWTSGDAFKTAYFLLKGAPLQFSVCGLLQVLVDLAILGQATA

SEQ ID NO: 127 - protein, 68 aa, Homo sapiens
MDFVAGAIGGVCGVAVGYPLDTVKVRIQTEPLYTGIWHCVRDTYHRERVWGFYRGLSLPVCTVSLVSS

SEQ ID NO: 128 - protein, 49 aa, Homo sapiens
MEKPLFPLVPLHWFGFGYTALVVSGGIVGYVKTGSVPSLAAGLLFGSLA

SEQ ID NO: 129 - protein, 15 aa, Homo sapiens
MGLLLPLALCILVLC

SEQ ID NO: 130 - protein, 26 aa, Homo sapiens
MGIQTSPVLLASLGVGLVTLLGLAVG

SEQ ID NO: 131 - protein, 25 aa, Homo sapiens
MSDLLLLGLIGGLTLLLLLTLLAFA

SEQ ID NO: 132 - protein, 29 aa, Homo sapiens
METVVIVAIGVLATIFLASFAALVLVCRQ

SEQ ID NO: 133 - protein, 35 aa, Homo sapiens
MAGSVECTWGWGHCAPSPLLLWTLLLFAAPFGLLG

SEQ ID NO: 134 - protein, 57 aa, Homo sapiens
MMPSRTNLATGIPSSKVKYSRLSSTDDGYIDLQFKKTPPKIPYKAIALATVLFLIGA

SEQ ID NO: 135 - protein, 36 aa, Homo sapiens
MALPQMCDGSHLASTLRYCMTVSGTVVLVAGTLCFA

SEQ ID NO: 136 - protein, 21 aa, Artificial Sequence
  Description of Artificial Sequence: Bacterial Signal Sequence
MKKWFVAAGIGAGLLMLSSAA

SEQ ID NO: 137 - protein, 21 aa, Artificial Sequence
  Description of Artificial Sequence: Bacterial Signal Sequence
MKQSTIALALLPLLFTPVTKA

SEQ ID NO: 138 - protein, 21 aa, Artificial Sequence
  Description of Artificial Sequence: Bacterial Signal Sequence
MKKTAIAIAVALAGFATVAQA

SEQ ID NO: 139 - protein, 21 aa, Artificial Sequence
  Description of Artificial Sequence: Bacterial Signal Sequence
MKKLMLAIFFSVLSFPSFSQS

SEQ ID NO: 140 - protein, 23 aa, Artificial Sequence
  Description of Artificial Sequence: Bacterial Signal Sequence
MKKNIAFLLASMFVFSIATNAYA

SEQ ID NO: 141 - protein, 32 aa, Homo sapiens
MFAKRFKTSLLPLFAGFLLLFHLVLAGPAAAS

SEQ ID NO: 142 - protein, 19 aa, Homo sapiens
MRFPSIFTAVLFAASSALA

SEQ ID NO: 143 - protein, 19 aa, Homo sapiens
MRFPSIFTTVLFAASSALA

SEQ ID NO: 144 - protein, 19 aa, Homo sapiens
MRFPSIFTSVLFAASSALA

SEQ ID NO: 145 - protein, 19 aa, Homo sapiens
MRFPSIFTHVLFAASSALA

SEQ ID NO: 146 - protein, 19 aa, Homo sapiens
MRFPSIFTIVLFAASSALA

SEQ ID NO: 147 - protein, 19 aa, Homo sapiens
MRFPSIFTFVLFAASSALA

SEQ ID NO: 148 - protein, 19 aa, Homo sapiens
MRFPSIFTEVLFAASSALA

SEQ ID NO: 149 - protein, 19 aa, Homo sapiens
MRFPSIFTGVLFAASSALA

SEQ ID NO: 150 - protein, 21 aa, Homo sapiens
MRSSPLLRSAVVAALPVLALA

SEQ ID NO: 151 - protein, 22 aa, Homo sapiens
MGAAAVRWHLCVLLALGTRGRL

SEQ ID NO: 152 - protein, 17 aa, Artificial Sequence
  Description of Artificial Sequence: Signal Sequence
MRSSLVLFFVSAWTALA

SEQ ID NO: 153 - protein, 32 aa, Homo sapiens
MLRGPGPGRLLLLAVLCLGTSVRCTETGKSKR

SEQ ID NO: 154 - protein, 26 aa, Homo sapiens
MLRGPGPGLLLLAVQCLGTAVPSTGA

SEQ ID NO: 155 - protein, 31 aa, Homo sapiens
MRRGALTGLLLVLCLSVVLRAAPSATSKKRR

SEQ ID NO: 156 - protein, 4 aa, Homo sapiens
  MOD_RES (2)..(3): Xaa= Any amino acid
RXXR

SEQ ID NO: 157 - protein, 4 aa, Homo sapiens
  MOD_RES (2)..(3): Xaa= Any amino acid
RXXR

SEQ ID NO: 158 - protein, 6 aa, Homo sapiens
  MOD_RES (1)..(1): Xaa= Lys or Arg
  MOD_RES (2)..(5): Xaa= Any amino acid
  MOD_RES (6)..(6): Xaa= Lys or Arg
XXXXXX

SEQ ID NO: 159 - protein, 8 aa, Homo sapiens
  MOD_RES (1)..(1): Xaa = Lys or Arg
  MOD_RES (2)..(7): Xaa = Any amino acid
  MOD_RES (8)..(8): Xaa = Lys or Arg
XXXXXXXX

SEQ ID NO: 160 - protein, 6 aa, Homo sapiens
LVPRGS

SEQ ID NO: 161 - protein, 4 aa, Homo sapiens
LVPR

SEQ ID NO: 162 - protein, 4 aa, Homo sapiens
  MOD_RES (1)..(1): Xaa = Ala, Phe, Gly, Ile, Leu, Thr, Val or Met
  MOD_RES (2)..(2): Xaa = Ala, Phe, Gly, Ile, Leu, Thr, Val or Trp
XXPR

SEQ ID NO: 163 - protein, 4 aa, Homo sapiens
IEGR

SEQ ID NO: 164 - protein, 4 aa, Homo sapiens
IDGR

SEQ ID NO: 165 - protein, 4 aa, Homo sapiens
AEGR

SEQ ID NO: 166 - protein, 4 aa, Homo sapiens
  MOD_RES (1)..(1): Xaa = Ala, Phe, Gly, Ile, Leu, Thr, Val or Met
  MOD_RES (2)..(2): Xaa = Asp or Glu
XXGR

SEQ ID NO: 167 - RNA, 22 nt, Homo sapiens
cuguacagccuccuagcuuucc

SEQ ID NO: 168 - RNA, 21 nt, Homo sapiens
cuauacaaucuacugucuuuc

SEQ ID NO: 169 - RNA, 22 nt, Homo sapiens
ugagguaguagguuguauaguu

SEQ ID NO: 170 - RNA, 22 nt, Homo sapiens
cuauacaaccuacugccuuccc

SEQ ID NO: 171 - RNA, 22 nt, Homo sapiens
ugagguaguagguugugugguu

SEQ ID NO: 172 - RNA, 22 nt, Homo sapiens
ugagguaguagguuguaugguu

SEQ ID NO: 173 - RNA, 22 nt, Homo sapiens
cuauacgaccugcugccuuucu

SEQ ID NO: 174 - RNA, 22 nt, Homo sapiens
agagguaguagguugcauaguu

SEQ ID NO: 175 - RNA, 22 nt, Homo sapiens
cuauacggccuccuagcuuucc

SEQ ID NO: 176 - RNA, 22 nt, Homo sapiens
ugagguaggagguuguauaguu

SEQ ID NO: 177 - RNA, 22 nt, Homo sapiens
cuauacaaucuauugccuuccc

SEQ ID NO: 178 - RNA, 22 nt, Homo sapiens
cuauacagucuacugucuuucc

SEQ ID NO: 179 - RNA, 22 nt, Homo sapiens
ugagguaguagauuguauaguu

SEQ ID NO: 180 - RNA, 21 nt, Homo sapiens
cuguacaggccacugccuugc

SEQ ID NO: 181 - RNA, 22 nt, Homo sapiens
ugagguaguaguuuguacaguu

SEQ ID NO: 182 - RNA, 22 nt, Homo sapiens
cugcgcaagcuacugccuugcu

SEQ ID NO: 183 - RNA, 22 nt, Homo sapiens
ugagguaguaguuugugcuguu

SEQ ID NO: 184 - RNA, 22 nt, Homo sapiens
uggaauguaaagaaguauguau

SEQ ID NO: 185 - RNA, 22 nt, Homo sapiens
caagcuuguaucuauagguaug

SEQ ID NO: 186 - RNA, 22 nt, Homo sapiens
aacccguagauccgaacuugug

SEQ ID NO: 187 - RNA, 21 nt, Homo sapiens
uacaguacugugauaacugaa

SEQ ID NO: 188 - RNA, 22 nt, Homo sapiens
caguuaucacagugcugaugcu

SEQ ID NO: 189 - RNA, 23 nt, Homo sapiens
agcuucuuuacagugcugccuug

SEQ ID NO: 190 - RNA, 23 nt, Homo sapiens
agcagcauuguacagggcuauga

SEQ ID NO: 191 - RNA, 23 nt, Homo sapiens
ucauagcccuguacaaugcugcu

SEQ ID NO: 192 - RNA, 22 nt, Homo sapiens
acggauguuugagcaugugcua

SEQ ID NO: 193 - RNA, 23 nt, Homo sapiens
ucaaaugcucagacuccuguggu

SEQ ID NO: 194 - RNA, 22 nt, Homo sapiens
cugcaauguaagcacuucuuac

SEQ ID NO: 195 - RNA, 23 nt, Homo sapiens
aaaagugcuuacagugcagguag

SEQ ID NO: 196 - RNA, 22 nt, Homo sapiens
ccgcacuguggguacuugcugc

SEQ ID NO: 197 - RNA, 21 nt, Homo sapiens
uaaagugcugacagugcagau

SEQ ID NO: 198 - RNA, 23 nt, Homo sapiens
agcagcauuguacagggcuauca

SEQ ID NO: 199 - RNA, 22 nt, Homo sapiens
caaauucguaucuaggggaaua

SEQ ID NO: 200 - RNA, 23 nt, Homo sapiens
uacccuguagauccgaauuugug

SEQ ID NO: 201 - RNA, 22 nt, Homo sapiens
acagauucgauucuaggggaau

SEQ ID NO: 202 - RNA, 23 nt, Homo sapiens
uacccuguagaaccgaauuugug

SEQ ID NO: 203 - RNA, 21 nt, Homo sapiens
uugcucacuguucuucccuag

SEQ ID NO: 204 - RNA, 18 nt, Homo sapiens
cagggucagcugagcaug

SEQ ID NO: 205 - RNA, 21 nt, Homo sapiens
aagcauucuuucauugguugg

SEQ ID NO: 206 - RNA, 22 nt, Homo sapiens
uuuccggcucgcgugggugugu

SEQ ID NO: 207 - RNA, 21 nt, Homo sapiens
ccgucgccgccacccgagccg

SEQ ID NO: 208 - RNA, 23 nt, Homo sapiens
gagggucuugggagggaugugac

SEQ ID NO: 209 - RNA, 27 nt, Homo sapiens
cacuguaggugauggugagagugggca

SEQ ID NO: 210 - RNA, 23 nt, Homo sapiens
ccugcagcgacuugauggcuucc

SEQ ID NO: 211 - RNA, 22 nt, Homo sapiens
auauacagggggagacucuuau

SEQ ID NO: 212 - RNA, 22 nt, Homo sapiens
auauacagggggagacucucau

SEQ ID NO: 213 - RNA, 21 nt, Homo sapiens
agaggauacccuuuguauguu

SEQ ID NO: 214 - RNA, 23 nt, Homo sapiens
gggaugguagaccggugacgugc

SEQ ID NO: 215 - RNA, 21 nt, Homo sapiens
uaggacacauggucuacuucu

SEQ ID NO: 216 - RNA, 22 nt, Homo sapiens
cuccugagccauucugagccuc

SEQ ID NO: 217 - RNA, 21 nt, Homo sapiens
gugccagcugcagugggggag

SEQ ID NO: 218 - RNA, 21 nt, Homo sapiens
cccggagccaggaugcagcuc

SEQ ID NO: 219 - RNA, 21 nt, Homo sapiens
ucguggccuggucuccauuau

SEQ ID NO: 220 - RNA, 20 nt, Homo sapiens
ucugcaggguuugcuuugag

SEQ ID NO: 221 - RNA, 21 nt, Homo sapiens
uguucauguagauguuuaagc

SEQ ID NO: 222 - RNA, 18 nt, Homo sapiens
ucagcuggcccucauuuc

SEQ ID NO: 223 - RNA, 21 nt, Homo sapiens
uggcagggaggcugggagggg

SEQ ID NO: 224 - RNA, 20 nt, Homo sapiens
ucacuguucagacaggcgga

SEQ ID NO: 225 - RNA, 22 nt, Homo sapiens
aacgccauuaucacacuaaaua

SEQ ID NO: 226 - RNA, 21 nt, Homo sapiens
ccccaccuccucucuccucag

SEQ ID NO: 227 - RNA, 19 nt, Homo sapiens
gugaggacucgggaggugg

SEQ ID NO: 228 - RNA, 22 nt, Homo sapiens
ugagccccugugccgcccccag

SEQ ID NO: 229 - RNA, 22 nt, Homo sapiens
guggguacggcccagugggggg

SEQ ID NO: 230 - RNA, 22 nt, Homo sapiens
uggagugugacaaugguguuug

SEQ ID NO: 231 - RNA, 22 nt, Homo sapiens
ucaccagcccuguguucccuag

SEQ ID NO: 232 - RNA, 26 nt, Homo sapiens
gugagggcaugcaggccuggaugggg

SEQ ID NO: 233 - RNA, 20 nt, Homo sapiens
cgugccacccuuuuccccag

SEQ ID NO: 234 - RNA, 17 nt, Homo sapiens
guggggccaggcggugg

SEQ ID NO: 235 - RNA, 20 nt, Homo sapiens
ucacaccugccucgcccccc

SEQ ID NO: 236 - RNA, 21 nt, Homo sapiens
gugggcgggggcaggugugug

SEQ ID NO: 237 - RNA, 23 nt, Homo sapiens
cucucaccacugcccucccacag

SEQ ID NO: 238 - RNA, 24 nt, Homo sapiens
guggguaggguuugggggagagcg

SEQ ID NO: 239 - RNA, 20 nt, Homo sapiens
gugucugggcggacagcugc

SEQ ID NO: 240 - RNA, 22 nt, Homo sapiens
agugggaggccagggcacggca

SEQ ID NO: 241 - RNA, 20 nt, Homo sapiens
ugagcccuguccucccgcag

SEQ ID NO: 242 - RNA, 22 nt, Homo sapiens
ucggccugaccacccaccccac

SEQ ID NO: 243 - RNA, 21 nt, Homo sapiens
ggggggggggggggggggccg

SEQ ID NO: 244 - RNA, 22 nt, Homo sapiens
ccucuuccccuugucucuccag

SEQ ID NO: 245 - RNA, 22 nt, Homo sapiens
ugagugacaggggaaaugggga

SEQ ID NO: 246 - RNA, 21 nt, Homo sapiens
uccuucugcuccgucccccag

SEQ ID NO: 247 - RNA, 21 nt, Homo sapiens
cgggggcggggccgaagcgcg

SEQ ID NO: 248 - RNA, 20 nt, Homo sapiens
cuuccucgucugucugcccc

SEQ ID NO: 249 - RNA, 23 nt, Homo sapiens
gugagugggagccccagugugug

SEQ ID NO: 250 - RNA, 22 nt, Homo sapiens
aacuggaucaauuauaggagug

SEQ ID NO: 251 - RNA, 20 nt, Homo sapiens
uaaggcacgcggugaaugcc

SEQ ID NO: 252 - RNA, 26 nt, Homo sapiens
aaguaguugguuuguaugagaugguu

SEQ ID NO: 253 - RNA, 21 nt, Homo sapiens
aagugaucuaaaggccuacau

SEQ ID NO: 254 - RNA, 22 nt, Homo sapiens
ucagaugaucuaaaggccuaua

SEQ ID NO: 255 - RNA, 21 nt, Homo sapiens
uaggccuuuagaucacuuaaa

SEQ ID NO: 256 - RNA, 22 nt, Homo sapiens
cguguucacagcggaccuugau

SEQ ID NO: 257 - RNA, 19 nt, Homo sapiens
aauggauuuuuggagcagg

SEQ ID NO: 258 - RNA, 24 nt, Homo sapiens
ccccgggaacgucgagacuggagc

SEQ ID NO: 259 - RNA, 22 nt, Homo sapiens
acccgucccguucguccccgga

SEQ ID NO: 260 - RNA, 27 nt, Homo sapiens
accuucuuguauaagcacugugcuaaa

SEQ ID NO: 261 - RNA, 22 nt, Homo sapiens
acgcccuucccccccuucuuca

SEQ ID NO: 262 - RNA, 21 nt, Homo sapiens
acggugcuggauguggccuuu

SEQ ID NO: 263 - RNA, 21 nt, Homo sapiens
acucuagcugccaaaggcgcu

SEQ ID NO: 264 - RNA, 22 nt, Homo sapiens
agaaggaaauugaauucauuua

SEQ ID NO: 265 - RNA, 21 nt, Homo sapiens
agagaagaagaucagccugca

SEQ ID NO: 266 - RNA, 24 nt, Homo sapiens
agccuggaagcuggagccugcagu

SEQ ID NO: 267 - RNA, 23 nt, Homo sapiens
aggaugagcaaagaaaguagauu

SEQ ID NO: 268 - RNA, 22 nt, Homo sapiens
aaccacuuucuuugcucaucca

SEQ ID NO: 269 - RNA, 22 nt, Homo sapiens
cggaugagcaaagaaagugguu

SEQ ID NO: 270 - RNA, 22 nt, Homo sapiens
aggcauugacuucucacuagcu

SEQ ID NO: 271 - RNA, 21 nt, Homo sapiens
agugaaugauggguucugacc

SEQ ID NO: 272 - RNA, 21 nt, Homo sapiens
aguuaggauuaggucguggaa

SEQ ID NO: 273 - RNA, 22 nt, Homo sapiens
acaggugagguucuugggagcc

SEQ ID NO: 274 - RNA, 24 nt, Homo sapiens
ucccugagacccuuuaaccuguga

SEQ ID NO: 275 - RNA, 22 nt, Homo sapiens
acggguuaggcucuugggagcu

SEQ ID NO: 276 - RNA, 22 nt, Homo sapiens
ucacaagucaggcucuugggac

SEQ ID NO: 277 - RNA, 22 nt, Homo sapiens
ucccugagacccuaacuuguga

SEQ ID NO: 278 - RNA, 18 nt, Homo sapiens
aucccaccucugccacca

SEQ ID NO: 279 - RNA, 19 nt, Homo sapiens
aucccaccacugccaccau

SEQ ID NO: 280 - RNA, 19 nt, Homo sapiens
auggauaaggcuuuggcuu

SEQ ID NO: 281 - RNA, 22 nt, Homo sapiens
augggugaauuuguagaaggau

SEQ ID NO: 282 - RNA, 22 nt, Homo sapiens
augguacccuggcauacugagu

SEQ ID NO: 283 - RNA, 22 nt, Homo sapiens
ucguaccgugaguaauaaugcg

SEQ ID NO: 284 - RNA, 23 nt, Homo sapiens
caagucuuauuugagcaccuguu

SEQ ID NO: 285 - RNA, 22 nt, Homo sapiens
caggauguggucaaguguuguu

SEQ ID NO: 286 - RNA, 21 nt, Homo sapiens
cauuauuacuuuugguacgcg

SEQ ID NO: 287 - RNA, 23 nt, Homo sapiens
ccucagggcuguagaacagggcu

SEQ ID NO: 288 - RNA, 21 nt, Homo sapiens
ccuguugaaguguaaucccca

SEQ ID NO: 289 - RNA, 18 nt, Homo sapiens
cgggcguggugguggggg

SEQ ID NO: 290 - RNA, 20 nt, Homo sapiens
cgggcgugguggugggggug

SEQ ID NO: 291 - RNA, 22 nt, Homo sapiens
cuggacugagccgugcuacugg

SEQ ID NO: 292 - RNA, 22 nt, Homo sapiens
cuggacugagccaugcuacugg

SEQ ID NO: 293 - RNA, 23 nt, Homo sapiens
cuggagauauggaagagcugugu

SEQ ID NO: 294 - RNA, 22 nt, Homo sapiens
agugccugcuaugugccaggca

SEQ ID NO: 295 - RNA, 22 nt, Homo sapiens
cuuggcaccuagcaagcacuca

SEQ ID NO: 296 - RNA, 26 nt, Homo sapiens
gaugaugauggcagcaaauucugaaa

SEQ ID NO: 297 - RNA, 25 nt, Homo sapiens
gggcgacaaagcaagacucuuucuu

SEQ ID NO: 298 - RNA, 22 nt, Homo sapiens
ggcgacaaaacgagacccuguc

SEQ ID NO: 299 - RNA, 25 nt, Homo sapiens
gaacccaugagguugaggcugcagu

SEQ ID NO: 300 - RNA, 22 nt, Homo sapiens
uugcuugaacccaggaagugga

SEQ ID NO: 301 - RNA, 19 nt, Homo sapiens
ggagauggagguugcagug

SEQ ID NO: 302 - RNA, 21 nt, Homo sapiens
accacugcacuccagccugag

SEQ ID NO: 303 - RNA, 22 nt, Homo sapiens
ggugguugaggcugcaguaagu

SEQ ID NO: 304 - RNA, 22 nt, Homo sapiens
ucggauccgucugagcuuggcu

SEQ ID NO: 305 - RNA, 17 nt, Homo sapiens
gugggggagaggcuguc

SEQ ID NO: 306 - RNA, 22 nt, Homo sapiens
cugaagcucagagggcucugau

SEQ ID NO: 307 - RNA, 20 nt, Homo sapiens
uaaagagcccuguggagaca

SEQ ID NO: 308 - RNA, 22 nt, Homo sapiens
uacguagauauauauguauuuu

SEQ ID NO: 309 - RNA, 24 nt, Homo sapiens
aaauauauauauauauguacguau

SEQ ID NO: 310 - RNA, 22 nt, Homo sapiens
uaguacugugcauaucaucuau

SEQ ID NO: 311 - RNA, 17 nt, Homo sapiens
ucauauugcuucuuucu

SEQ ID NO: 312 - RNA, 21 nt, Homo sapiens
ucacagugaaccggucucuuu

SEQ ID NO: 313 - RNA, 17 nt, Homo sapiens
ucgccuccuccucuccc

SEQ ID NO: 314 - RNA, 20 nt, Homo sapiens
ucguuugccuuuuucugcuu

SEQ ID NO: 315 - RNA, 22 nt, Homo sapiens
ucuacaaaggaaagcgcuuucu

SEQ ID NO: 316 - RNA, 22 nt, Homo sapiens
ucuauacagacccuggcuuuuc

SEQ ID NO: 317 - RNA, 22 nt, Homo sapiens
ucugggcaacaaagugagaccu

SEQ ID NO: 318 - RNA, 21 nt, Homo sapiens
gaucucacuuuguugcccagg

SEQ ID NO: 319 - RNA, 21 nt, Homo sapiens
ugcaggaccaagaugagcccu

SEQ ID NO: 320 - RNA, 22 nt, Homo sapiens
ugcuggaucagugguucgaguc

SEQ ID NO: 321 - RNA, 21 nt, Homo sapiens
uggacugcccugaucuggaga

SEQ ID NO: 322 - RNA, 23 nt, Homo sapiens
uggaguccaggaaucugcauuuu

SEQ ID NO: 323 - RNA, 19 nt, Homo sapiens
uggauuuuuggaucaggga

SEQ ID NO: 324 - RNA, 24 nt, Homo sapiens
uggcccugacugaagaccagcagu

SEQ ID NO: 325 - RNA, 22 nt, Homo sapiens
aagcccuuaccccaaaaaguau

SEQ ID NO: 326 - RNA, 20 nt, Homo sapiens
ucgcgccccggcucccguuc

SEQ ID NO: 327 - RNA, 22 nt, Homo sapiens
aagcccuuaccccaaaaagcau

SEQ ID NO: 328 - RNA, 25 nt, Homo sapiens
ugggaacggguuccggcagacgcug

SEQ ID NO: 329 - RNA, 22 nt, Homo sapiens
uggguggucuggagauuugugc

SEQ ID NO: 330 - RNA, 22 nt, Homo sapiens
ugugagguuggcauuguugucu

SEQ ID NO: 331 - RNA, 21 nt, Homo sapiens
uuaggccgcagaucuggguga

SEQ ID NO: 332 - RNA, 22 nt, Homo sapiens
aauaggccacggaucugggcaa

SEQ ID NO: 333 - RNA, 21 nt, Homo sapiens
cacccagaucugcggccuaau

SEQ ID NO: 334 - RNA, 21 nt, Homo sapiens
cuuuuugcggucugggcuugc

SEQ ID NO: 335 - RNA, 22 nt, Homo sapiens
uuagggcccuggcuccaucucc

SEQ ID NO: 336 - RNA, 17 nt, Homo sapiens
uucaaguaauucaggug

SEQ ID NO: 337 - RNA, 22 nt, Homo sapiens
uucauucggcuguccagaugua

SEQ ID NO: 338 - RNA, 22 nt, Homo sapiens
uucuggaauucugugugaggga

SEQ ID NO: 339 - RNA, 24 nt, Homo sapiens
uugcagcugccugggagugacuuc

SEQ ID NO: 340 - RNA, 21 nt, Homo sapiens
uugggacauacuuaugcuaaa

SEQ ID NO: 341 - RNA, 22 nt, Homo sapiens
uuuagagacggggucuugcucu

SEQ ID NO: 342 - RNA, 22 nt, Homo sapiens
ucucacuguagccucgaacccc

SEQ ID NO: 343 - RNA, 22 nt, Homo sapiens
uuugaggcuacagugagaugug

SEQ ID NO: 344 - RNA, 22 nt, Homo sapiens
uuuucaacucuaaugggagaga

SEQ ID NO: 345 - RNA, 18 nt, Homo sapiens
acguuggcucugguggug

SEQ ID NO: 346 - RNA, 22 nt, Homo sapiens
ccaccuccccugcaaacgucca

SEQ ID NO: 347 - RNA, 22 nt, Homo sapiens
acucggcguggcgucggucgug

SEQ ID NO: 348 - RNA, 21 nt, Homo sapiens
ucgaccggaccucgaccggcu

SEQ ID NO: 349 - RNA, 22 nt, Homo sapiens
cagugcaauguuaaaagggcau

SEQ ID NO: 350 - RNA, 22 nt, Homo sapiens
uucacauugugcuacugucugc

SEQ ID NO: 351 - RNA, 22 nt, Homo sapiens
cagugcaaugaugaaagggcau

SEQ ID NO: 352 - RNA, 21 nt, Homo sapiens
acucuuucccuguugcacuac

SEQ ID NO: 353 - RNA, 18 nt, Homo sapiens
cagggaggugaaugugau

SEQ ID NO: 354 - RNA, 19 nt, Homo sapiens
gaugaugcugcugaugcug

SEQ ID NO: 355 - RNA, 22 nt, Homo sapiens
ucaaaacugaggggcauuuucu

SEQ ID NO: 356 - RNA, 22 nt, Homo sapiens
uaacagucuacagccauggucg

SEQ ID NO: 357 - RNA, 24 nt, Homo sapiens
ccagacagaauucuaugcacuuuc

SEQ ID NO: 358 - RNA, 22 nt, Homo sapiens
accguggcuuucgauuguuacu

SEQ ID NO: 359 - RNA, 22 nt, Homo sapiens
uuugguccccuucaaccagcug

SEQ ID NO: 360 - RNA, 22 nt, Homo sapiens
uuugguccccuucaaccagcua

SEQ ID NO: 361 - RNA, 22 nt, Homo sapiens
ugugacugguugaccagagggg

SEQ ID NO: 362 - RNA, 22 nt, Homo sapiens
cuccuggggcccgcacucucgc

SEQ ID NO: 363 - RNA, 22 nt, Homo sapiens
uauagggauuggagccguggcg

SEQ ID NO: 364 - RNA, 23 nt, Homo sapiens
uauggcuuuuuauuccuauguga

SEQ ID NO: 365 - RNA, 22 nt, Homo sapiens
auguagggcuaaaagccauggg

SEQ ID NO: 366 - RNA, 23 nt, Homo sapiens
uauggcuuuucauuccuauguga

SEQ ID NO: 367 - RNA, 22 nt, Homo sapiens
caucaucgucucaaaugagucu

SEQ ID NO: 368 - RNA, 23 nt, Homo sapiens
acuccauuuguuuugaugaugga

SEQ ID NO: 369 - RNA, 23 nt, Homo sapiens
uuauugcuuaagaauacgcguag

SEQ ID NO: 370 - RNA, 22 nt, Homo sapiens
gcuacuucacaacaccagggcc

SEQ ID NO: 371 - RNA, 22 nt, Homo sapiens
gcuauuucacgacaccaggguu

SEQ ID NO: 372 - RNA, 23 nt, Homo sapiens
agcugguguugugaaucaggccg

SEQ ID NO: 373 - RNA, 23 nt, Homo sapiens
uggagacgcggcccuguuggagu

SEQ ID NO: 374 - RNA, 23 nt, Homo sapiens
ucuacagugcacgugucuccagu

SEQ ID NO: 375 - RNA, 21 nt, Homo sapiens
uaccacaggguagaaccacgg

SEQ ID NO: 376 - RNA, 22 nt, Homo sapiens
cagugguuuuacccuaugguag

SEQ ID NO: 377 - RNA, 22 nt, Homo sapiens
uaacacugucugguaaagaugg

SEQ ID NO: 378 - RNA, 22 nt, Homo sapiens
caucuuccaguacaguguugga

SEQ ID NO: 379 - RNA, 23 nt, Homo sapiens
uguaguguuuccuacuuuaugga

SEQ ID NO: 380 - RNA, 21 nt, Homo sapiens
cauaaaguagaaagcacuacu

SEQ ID NO: 381 - RNA, 21 nt, Homo sapiens
ugagaugaagcacuguagcuc

SEQ ID NO: 382 - RNA, 22 nt, Homo sapiens
ggugcagugcugcaucucuggu

SEQ ID NO: 383 - RNA, 20 nt, Homo sapiens
uacaguauagaugauguacu

SEQ ID NO: 384 - RNA, 22 nt, Homo sapiens
ggauaucaucauauacuguaag

SEQ ID NO: 385 - RNA, 22 nt, Homo sapiens
ggauuccuggaaauacuguucu

SEQ ID NO: 386 - RNA, 23 nt, Homo sapiens
guccaguuuucccaggaaucccu

SEQ ID NO: 387 - RNA, 21 nt, Homo sapiens
cuccguuugccuguuucgcug

SEQ ID NO: 388 - RNA, 22 nt, Homo sapiens
cucggcgcggggcgcgggcucc

SEQ ID NO: 389 - RNA, 22 nt, Homo sapiens
ccucugaaauucaguucuucag

SEQ ID NO: 390 - RNA, 22 nt, Homo sapiens
ugagaacugaauuccauggguu

SEQ ID NO: 391 - RNA, 22 nt, Homo sapiens
ugcccuguggacucaguucugg

SEQ ID NO: 392 - RNA, 22 nt, Homo sapiens
ugagaacugaauuccauaggcu

SEQ ID NO: 393 - RNA, 21 nt, Homo sapiens
gcccuccgcccgugcaccccg

SEQ ID NO: 394 - RNA, 22 nt, Homo sapiens
gcccgcguguggagccaggugu

SEQ ID NO: 395 - RNA, 20 nt, Homo sapiens
guguguggaaaugcuucugc

SEQ ID NO: 396 - RNA, 22 nt, Homo sapiens
gugugcggaaaugcuucugcua

SEQ ID NO: 397 - RNA, 22 nt, Homo sapiens
ucagugcacuacagaacuuugu

SEQ ID NO: 398 - RNA, 22 nt, Homo sapiens
aaaguucugagacacuccgacu

SEQ ID NO: 399 - RNA, 22 nt, Homo sapiens
ucagugcaucacagaacuuugu

SEQ ID NO: 400 - RNA, 22 nt, Homo sapiens
aaguucuguuauacacucaggc

SEQ ID NO: 401 - RNA, 21 nt, Homo sapiens
agggagggacgggggcugugc

SEQ ID NO: 402 - RNA, 23 nt, Homo sapiens
ucuggcuccgugucuucacuccc

SEQ ID NO: 403 - RNA, 22 nt, Homo sapiens
cugguacaggccugggggacag

SEQ ID NO: 404 - RNA, 22 nt, Homo sapiens
ucucccaacccuuguaccagug

SEQ ID NO: 405 - RNA, 21 nt, Homo sapiens
cuagacugaagcuccuugagg

SEQ ID NO: 406 - RNA, 21 nt, Homo sapiens
ucgaggagcucacagucuagu

SEQ ID NO: 407 - RNA, 18 nt, Homo sapiens
ucgaggagcucacagucu

SEQ ID NO: 408 - RNA, 21 nt, Homo sapiens
ucagugcaugacagaacuugg

SEQ ID NO: 409 - RNA, 22 nt, Homo sapiens
uugcauagucacaaaagugauc

SEQ ID NO: 410 - RNA, 22 nt, Homo sapiens
aaaaccgucuaguuacaguugu

SEQ ID NO: 411 - RNA, 23 nt, Homo sapiens
cggcccgggcugcugcuguuccu

SEQ ID NO: 412 - RNA, 21 nt, Homo sapiens
uccugcgcgucccagaugccc

SEQ ID NO: 413 - RNA, 22 nt, Homo sapiens
aaucauacacgguugaccuauu

SEQ ID NO: 414 - RNA, 22 nt, Homo sapiens
uagguuauccguguugccuucg

SEQ ID NO: 415 - RNA, 22 nt, Homo sapiens
cuccuacauauuagcauuaaca

SEQ ID NO: 416 - RNA, 23 nt, Homo sapiens
uuaaugcuaaucgugauaggggu

SEQ ID NO: 417 - RNA, 20 nt, Homo sapiens
uugggcugggcuggguuggg

SEQ ID NO: 418 - RNA, 22 nt, Homo sapiens
caggccauauugugcugccuca

SEQ ID NO: 419 - RNA, 22 nt, Homo sapiens
uagcagcacauaaugguuugug

SEQ ID NO: 420 - RNA, 22 nt, Homo sapiens
cgaaucauuauuugcugcucua

SEQ ID NO: 421 - RNA, 22 nt, Homo sapiens
uagcagcacaucaugguuuaca

SEQ ID NO: 422 - RNA, 22 nt, Homo sapiens
ccaguauuaacugugcugcuga

SEQ ID NO: 423 - RNA, 22 nt, Homo sapiens
ccaauauuacugugcugcuuua

SEQ ID NO: 424 - RNA, 22 nt, Homo sapiens
uagcagcacguaaauauuggcg

SEQ ID NO: 425 - RNA, 22 nt, Homo sapiens
acugcagugaaggcacuuguag

SEQ ID NO: 426 - RNA, 23 nt, Homo sapiens
caaagugcuuacagugcagguag

SEQ ID NO: 427 - RNA, 22 nt, Homo sapiens
accacugaccguugacuguacc

SEQ ID NO: 428 - RNA, 22 nt, Homo sapiens
accaucgaccguugauuguacc

SEQ ID NO: 429 - RNA, 23 nt, Homo sapiens
aacauucaacgcugucggugagu

SEQ ID NO: 430 - RNA, 21 nt, Homo sapiens
cucacugaacaaugaaugcaa

SEQ ID NO: 431 - RNA, 23 nt, Homo sapiens
aacauucauugcugucggugggu

SEQ ID NO: 432 - RNA, 22 nt, Homo sapiens
aaccaucgaccguugaguggac

SEQ ID NO: 433 - RNA, 22 nt, Homo sapiens
aacauucaaccugucggugagu

SEQ ID NO: 434 - RNA, 23 nt, Homo sapiens
aacauucauuguugucggugggu

SEQ ID NO: 435 - RNA, 21 nt, Homo sapiens
ugguucuagacuugccaacua

SEQ ID NO: 436 - RNA, 18 nt, Homo sapiens
uccagugcccuccucucc

SEQ ID NO: 437 - RNA, 24 nt, Homo sapiens
uuuggcaaugguagaacucacacu

SEQ ID NO: 438 - RNA, 18 nt, Homo sapiens
ugaggcaguagauugaau

SEQ ID NO: 439 - RNA, 22 nt, Homo sapiens
gugaauuaccgaagggccauaa

SEQ ID NO: 440 - RNA, 22 nt, Homo sapiens
uauggcacugguagaauucacu

SEQ ID NO: 441 - RNA, 22 nt, Homo sapiens
uggacggagaacugauaagggu

SEQ ID NO: 442 - RNA, 22 nt, Homo sapiens
aggggcuggcuuuccucugguc

SEQ ID NO: 443 - RNA, 22 nt, Homo sapiens
uggagagaaaggcaguuccuga

SEQ ID NO: 444 - RNA, 22 nt, Homo sapiens
gcccaaaggugaauuuuuuggg

SEQ ID NO: 445 - RNA, 22 nt, Homo sapiens
caaagaauucuccuuuugggcu

SEQ ID NO: 446 - RNA, 22 nt, Homo sapiens
ucgugucuuguguugcagccgg

SEQ ID NO: 447 - RNA, 22 nt, Homo sapiens
ggcuacaacacaggacccgggc

SEQ ID NO: 448 - RNA, 21 nt, Homo sapiens
cucccacaugcaggguuugca

SEQ ID NO: 449 - RNA, 21 nt, Homo sapiens
caucccuugcaugguggaggg

SEQ ID NO: 450 - RNA, 23 nt, Homo sapiens
acugcccuaagugcuccuucugg

SEQ ID NO: 451 - RNA, 23 nt, Homo sapiens
uaaggugcaucuagugcagauag

SEQ ID NO: 452 - RNA, 22 nt, Homo sapiens
ugcccuaaaugccccuucuggc

SEQ ID NO: 453 - RNA, 23 nt, Homo sapiens
uaaggugcaucuagugcaguuag

SEQ ID NO: 454 - RNA, 21 nt, Homo sapiens
cggcggggacggcgauugguc

SEQ ID NO: 455 - RNA, 22 nt, Homo sapiens
cgcaggggccgggugcucaccg

SEQ ID NO: 456 - RNA, 21 nt, Homo sapiens
ugagugccggugccugcccug

SEQ ID NO: 457 - RNA, 22 nt, Homo sapiens
ugauauguuugauauauuaggu

SEQ ID NO: 458 - RNA, 21 nt, Homo sapiens
ugauauguuugauauuggguu

SEQ ID NO: 459 - RNA, 21 nt, Homo sapiens
ccaguccugugccugccgccu

SEQ ID NO: 460 - RNA, 20 nt, Homo sapiens
caccaggcauuguggucucc

SEQ ID NO: 461 - RNA, 23 nt, Homo sapiens
ugaguaccgccaugucuguuggg

SEQ ID NO: 462 - RNA, 22 nt, Homo sapiens
uacccagagcaugcagugugaa

SEQ ID NO: 463 - RNA, 22 nt, Homo sapiens
ucugcccccuccgcugcugcca

SEQ ID NO: 464 - RNA, 22 nt, Homo sapiens
gcugcgcuuggauuucgucccc

SEQ ID NO: 465 - RNA, 22 nt, Homo sapiens
ggaggggucccgcacugggagg

SEQ ID NO: 466 - RNA, 22 nt, Homo sapiens
cccugugcccggcccacuucug

SEQ ID NO: 467 - RNA, 20 nt, Homo sapiens
ccccagggcgacgcggcggg

SEQ ID NO: 468 - RNA, 22 nt, Homo sapiens
accuugccuugcugcccgggcc

SEQ ID NO: 469 - RNA, 23 nt, Homo sapiens
caacggaaucccaaaagcagcug

SEQ ID NO: 470 - RNA, 22 nt, Homo sapiens
cugccaauuccauaggucacag

SEQ ID NO: 471 - RNA, 21 nt, Homo sapiens
cugaccuaugaauugacagcc

SEQ ID NO: 472 - RNA, 22 nt, Homo sapiens
aacuggccuacaaagucccagu

SEQ ID NO: 473 - RNA, 22 nt, Homo sapiens
ugggucuuugcgggcgagauga

SEQ ID NO: 474 - RNA, 22 nt, Homo sapiens
aacuggcccucaaagucccgcu

SEQ ID NO: 475 - RNA, 22 nt, Homo sapiens
cgggguuuugagggcgagauga

SEQ ID NO: 476 - RNA, 22 nt, Homo sapiens
ccaguggggcugcuguuaucug

SEQ ID NO: 477 - RNA, 22 nt, Homo sapiens
uguaacagcaacuccaugugga

SEQ ID NO: 478 - RNA, 22 nt, Homo sapiens
ccaauauuggcugugcugcucc

SEQ ID NO: 479 - RNA, 21 nt, Homo sapiens
uagcagcacagaaauauuggc

SEQ ID NO: 480 - RNA, 22 nt, Homo sapiens
cggcaacaagaaacugccugag

SEQ ID NO: 481 - RNA, 22 nt, Homo sapiens
uagguaguuucauguuguuggg

SEQ ID NO: 482 - RNA, 22 nt, Homo sapiens
ucgacagcacgacacugccuuc

SEQ ID NO: 483 - RNA, 22 nt, Homo sapiens
uagguaguuuccuguuguuggg

SEQ ID NO: 484 - RNA, 22 nt, Homo sapiens
ucaggccaggcacaguggcuca

SEQ ID NO: 485 - RNA, 19 nt, Homo sapiens
accgugcaaagguagcaua

SEQ ID NO: 486 - RNA, 22 nt, Homo sapiens
uucaccaccuucuccacccagc

SEQ ID NO: 487 - RNA, 23 nt, Homo sapiens
cggguagagagggcagugggagg

SEQ ID NO: 488 - RNA, 20 nt, Homo sapiens
ccuccugcccuccuugcugu

SEQ ID NO: 489 - RNA, 22 nt, Homo sapiens
gguccagaggggagauagguuc

SEQ ID NO: 490 - RNA, 22 nt, Homo sapiens
acaguagucugcacauugguua

SEQ ID NO: 491 - RNA, 23 nt, Homo sapiens
cccaguguucagacuaccuguuc

SEQ ID NO: 492 - RNA, 22 nt, Homo sapiens
acaguagucugcacauugguua

SEQ ID NO: 493 - RNA, 23 nt, Homo sapiens
cccaguguuuagacuaucuguuc

SEQ ID NO: 494 - RNA, 23 nt, Homo sapiens
ugugcaaaucuaugcaaaacuga

SEQ ID NO: 495 - RNA, 22 nt, Homo sapiens
aguuuugcauaguugcacuaca

SEQ ID NO: 496 - RNA, 23 nt, Homo sapiens
aguuuugcagguuugcauccagc

SEQ ID NO: 497 - RNA, 22 nt, Homo sapiens
aguuuugcagguuugcauuuca

SEQ ID NO: 498 - RNA, 23 nt, Homo sapiens
ugugcaaauccaugcaaaacuga

SEQ ID NO: 499 - RNA, 22 nt, Homo sapiens
uaacacugucugguaacgaugu

SEQ ID NO: 500 - RNA, 22 nt, Homo sapiens
caucuuaccggacagugcugga

SEQ ID NO: 501 - RNA, 22 nt, Homo sapiens
uaauacugccugguaaugauga

SEQ ID NO: 502 - RNA, 22 nt, Homo sapiens
caucuuacugggcagcauugga

SEQ ID NO: 503 - RNA, 23 nt, Homo sapiens
uaauacugccggguaaugaugga

SEQ ID NO: 504 - RNA, 22 nt, Homo sapiens
cgucuuacccagcaguguuugg

SEQ ID NO: 505 - RNA, 20 nt, Homo sapiens
agagguauagggcaugggaa

SEQ ID NO: 506 - RNA, 22 nt, Homo sapiens
uuccuaugcauauacuucuuug

SEQ ID NO: 507 - RNA, 22 nt, Homo sapiens
gugaaauguuuaggaccacuag

SEQ ID NO: 508 - RNA, 23 nt, Homo sapiens
uugaacuguuaagaaccacugga

SEQ ID NO: 509 - RNA, 22 nt, Homo sapiens
uagugguccuaaacauuucaca

SEQ ID NO: 510 - RNA, 21 nt, Homo sapiens
gcugggaaggcaaagggacgu

SEQ ID NO: 511 - RNA, 22 nt, Homo sapiens
uucccuuugucauccuaugccu

SEQ ID NO: 512 - RNA, 20 nt, Homo sapiens
uguuuugauaacaguaaugu

SEQ ID NO: 513 - RNA, 23 nt, Homo sapiens
guguuaauuaaaccucuauuuac

SEQ ID NO: 514 - RNA, 21 nt, Homo sapiens
gauuucaguggagugaaguuc

SEQ ID NO: 515 - RNA, 23 nt, Homo sapiens
cuguaauauaaauuuaauuuauu

SEQ ID NO: 516 - RNA, 22 nt, Homo sapiens
uccuucauuccaccggagucug

SEQ ID NO: 517 - RNA, 22 nt, Homo sapiens
uggaauguaaggaagugugugg

SEQ ID NO: 518 - RNA, 22 nt, Homo sapiens
auaagacgagcaaaaagcuugu

SEQ ID NO: 519 - RNA, 22 nt, Homo sapiens
auaagacgaacaaaagguuugu

SEQ ID NO: 520 - RNA, 22 nt, Homo sapiens
acugcauuaugagcacuuaaag

SEQ ID NO: 521 - RNA, 23 nt, Homo sapiens
uaaagugcuuauagugcagguag

SEQ ID NO: 522 - RNA, 22 nt, Homo sapiens
acuguaguaugggcacuuccag

SEQ ID NO: 523 - RNA, 23 nt, Homo sapiens
caaagugcucauagugcagguag

SEQ ID NO: 524 - RNA, 22 nt, Homo sapiens
cugugcgugugacagcggcuga

SEQ ID NO: 525 - RNA, 22 nt, Homo sapiens
uuggggaaacggccgcugagug

SEQ ID NO: 526 - RNA, 21 nt, Homo sapiens
auuugugcuuggcucugucac

SEQ ID NO: 527 - RNA, 21 nt, Homo sapiens
gcagggacagcaaaggggugc

SEQ ID NO: 528 - RNA, 21 nt, Homo sapiens
cgagccucaagcaagggacuu

SEQ ID NO: 529 - RNA, 22 nt, Homo sapiens
uagucccuuccuugaagcgguc

SEQ ID NO: 530 - RNA, 22 nt, Homo sapiens
caucagaauucauggaggcuag

SEQ ID NO: 531 - RNA, 22 nt, Homo sapiens
agcuuccaugacuccugaugga

SEQ ID NO: 532 - RNA, 22 nt, Homo sapiens
uucccuuugucauccuucgccu

SEQ ID NO: 533 - RNA, 21 nt, Homo sapiens
ccucccaugccaagaacuccc

SEQ ID NO: 534 - RNA, 21 nt, Homo sapiens
gguucuuagcauaggaggucu

SEQ ID NO: 535 - RNA, 21 nt, Homo sapiens
uguucucuuugccaaggacag

SEQ ID NO: 536 - RNA, 21 nt, Homo sapiens
uaacagucuccagucacggcc

SEQ ID NO: 537 - RNA, 23 nt, Homo sapiens
accuuggcucuagacugcuuacu

SEQ ID NO: 538 - RNA, 21 nt, Homo sapiens
caacaccagucgaugggcugu

SEQ ID NO: 539 - RNA, 22 nt, Homo sapiens
acagcaggcacagacaggcagu

SEQ ID NO: 540 - RNA, 22 nt, Homo sapiens
ugccugucuacacuugcugugc

SEQ ID NO: 541 - RNA, 21 nt, Homo sapiens
augaccuaugaauugacagac

SEQ ID NO: 542 - RNA, 22 nt, Homo sapiens
uagcuuaucagacugauguuga

SEQ ID NO: 543 - RNA, 22 nt, Homo sapiens
ucacaguggucucugggauuau

SEQ ID NO: 544 - RNA, 22 nt, Homo sapiens
uaaucucagcuggcaacuguga

SEQ ID NO: 545 - RNA, 22 nt, Homo sapiens
aaaucucugcaggcaaauguga

SEQ ID NO: 546 - RNA, 23 nt, Homo sapiens
uacugcaucaggaacugauugga

SEQ ID NO: 547 - RNA, 22 nt, Homo sapiens
augguuccgucaagcaccaugg

SEQ ID NO: 548 - RNA, 22 nt, Homo sapiens
caugguucugucaagcaccgcg

SEQ ID NO: 549 - RNA, 21 nt, Homo sapiens
uugugcuugaucuaaccaugu

SEQ ID NO: 550 - RNA, 22 nt, Homo sapiens
agaguugagucuggacgucccg

SEQ ID NO: 551 - RNA, 22 nt, Homo sapiens
agaauuguggcuggacaucugu

SEQ ID NO: 552 - RNA, 21 nt, Homo sapiens
ugauuguccaaacgcaauucu

SEQ ID NO: 553 - RNA, 23 nt, Homo sapiens
agcuacauugucugcuggguuuc

SEQ ID NO: 554 - RNA, 22 nt, Homo sapiens
accuggcauacaauguagauuu

SEQ ID NO: 555 - RNA, 21 nt, Homo sapiens
agcuacaucuggcuacugggu

SEQ ID NO: 556 - RNA, 22 nt, Homo sapiens
cucaguagccaguguagauccu

SEQ ID NO: 557 - RNA, 22 nt, Homo sapiens
ugucaguuugucaaauacccca

SEQ ID NO: 558 - RNA, 22 nt, Homo sapiens
cguguauuugacaagcugaguu

SEQ ID NO: 559 - RNA, 22 nt, Homo sapiens
aagcugccaguugaagaacugu

SEQ ID NO: 560 - RNA, 23 nt, Homo sapiens
aaaauggugcccuagugacuaca

SEQ ID NO: 561 - RNA, 21 nt, Homo sapiens
caagucacuagugguuccguu

SEQ ID NO: 562 - RNA, 22 nt, Homo sapiens
aguucuucaguggcaagcuuua

SEQ ID NO: 563 - RNA, 22 nt, Homo sapiens
ucugcaagugucagaggcgagg

SEQ ID NO: 564 - RNA, 21 nt, Homo sapiens
ugacagcgcccugccuggcuc

SEQ ID NO: 565 - RNA, 24 nt, Homo sapiens
agcgcgggcugagcgcugccaguc

SEQ ID NO: 566 - RNA, 22 nt, Homo sapiens
gagagcaguguguguugccugg

SEQ ID NO: 567 - RNA, 22 nt, Homo sapiens
auuguccuugcuguuuggagau

SEQ ID NO: 568 - RNA, 21 nt, Homo sapiens
auccccagauacaauggacaa

SEQ ID NO: 569 - RNA, 20 nt, Homo sapiens
uaggaugggggugagaggug

SEQ ID NO: 570 - RNA, 21 nt, Homo sapiens
aucacauugccagggauuucc

SEQ ID NO: 571 - RNA, 22 nt, Homo sapiens
gggguuccuggggaugggauuu

SEQ ID NO: 572 - RNA, 21 nt, Homo sapiens
aucacauugccagggauuacc

SEQ ID NO: 573 - RNA, 22 nt, Homo sapiens
uggguuccuggcaugcugauuu

SEQ ID NO: 574 - RNA, 22 nt, Homo sapiens
aucacauugccagugauuaccc

SEQ ID NO: 575 - RNA, 22 nt, Homo sapiens
ugccuacugagcugauaucagu

SEQ ID NO: 576 - RNA, 22 nt, Homo sapiens
ugccuacugagcugaaacacag

SEQ ID NO: 577 - RNA, 22 nt, Homo sapiens
uggcucaguucagcaggaacag

SEQ ID NO: 578 - RNA, 22 nt, Homo sapiens
agcagaggcagagaggcucagg

SEQ ID NO: 579 - RNA, 23 nt, Homo sapiens
ugaggcucuguuagccuuggcuc

SEQ ID NO: 580 - RNA, 22 nt, Homo sapiens
cauugcacuugucucggucuga

SEQ ID NO: 581 - RNA, 21 nt, Homo sapiens
aggcggagacuugggcaauug

SEQ ID NO: 582 - RNA, 22 nt, Homo sapiens
uaucauggaguugguaaagcac

SEQ ID NO: 583 - RNA, 22 nt, Homo sapiens
guuuuaccaccuccaggagacu

SEQ ID NO: 584 - RNA, 22 nt, Homo sapiens
cgccucuucagcgcugucuucc

SEQ ID NO: 585 - RNA, 23 nt, Homo sapiens
caggcagugacuguucagacguc

SEQ ID NO: 586 - RNA, 22 nt, Homo sapiens
ccuauucuugguuacuugcacg

SEQ ID NO: 587 - RNA, 22 nt, Homo sapiens
ccuauucuugauuacuuguuuc

SEQ ID NO: 588 - RNA, 22 nt, Homo sapiens
uucaaguaauccaggauaggcu

SEQ ID NO: 589 - RNA, 22 nt, Homo sapiens
ccuguucuccauuacuuggcuc

SEQ ID NO: 590 - RNA, 21 nt, Homo sapiens
uucaaguaauucaggauaggu

SEQ ID NO: 591 - RNA, 21 nt, Homo sapiens
uucacaguggcuaaguuccgc

SEQ ID NO: 592 - RNA, 22 nt, Homo sapiens
agggcuuagcugcuugugagca

SEQ ID NO: 593 - RNA, 21 nt, Homo sapiens
uucacaguggcuaaguucugc

SEQ ID NO: 594 - RNA, 22 nt, Homo sapiens
agagcuuagcugauuggugaac

SEQ ID NO: 595 - RNA, 22 nt, Homo sapiens
cacuagauugugagcuccugga

SEQ ID NO: 596 - RNA, 22 nt, Homo sapiens
aaggagcucacagucuauugag

SEQ ID NO: 597 - RNA, 19 nt, Homo sapiens
ggggccuggcggugggcgg

SEQ ID NO: 598 - RNA, 21 nt, Homo sapiens
guuagggccaacaucucuugg

SEQ ID NO: 599 - RNA, 22 nt, Homo sapiens
gaggguuggguggaggcucucc

SEQ ID NO: 600 - RNA, 23 nt, Homo sapiens
agaauugcguuuggacaaucagu

SEQ ID NO: 601 - RNA, 22 nt, Homo sapiens
agauguccagccacaauucucg

SEQ ID NO: 602 - RNA, 21 nt, Homo sapiens
agggcccccccucaauccugu

SEQ ID NO: 603 - RNA, 21 nt, Homo sapiens
auguaugugugcaugugcaug

SEQ ID NO: 604 - RNA, 24 nt, Homo sapiens
agcagaagcagggagguucuccca

SEQ ID NO: 605 - RNA, 22 nt, Homo sapiens
uaugugggaugguaaaccgcuu

SEQ ID NO: 606 - RNA, 22 nt, Homo sapiens
ugguuuaccgucccacauacau

SEQ ID NO: 607 - RNA, 22 nt, Homo sapiens
uagcaccaucugaaaucgguua

SEQ ID NO: 608 - RNA, 22 nt, Homo sapiens
acugauuucuuuugguguucag

SEQ ID NO: 609 - RNA, 24 nt, Homo sapiens
gcugguuucauauggugguuuaga

SEQ ID NO: 610 - RNA, 22 nt, Homo sapiens
cugguuucacaugguggcuuag

SEQ ID NO: 611 - RNA, 23 nt, Homo sapiens
uagcaccauuugaaaucaguguu

SEQ ID NO: 612 - RNA, 22 nt, Homo sapiens
uagcaccauuugaaaucgguua

SEQ ID NO: 613 - RNA, 22 nt, Homo sapiens
ugaccgauuucuccugguguuc

SEQ ID NO: 614 - RNA, 22 nt, Homo sapiens
uauacaagggcagacucucucu

SEQ ID NO: 615 - RNA, 23 nt, Homo sapiens
cagugcaauaguauugucaaagc

SEQ ID NO: 616 - RNA, 22 nt, Homo sapiens
gcucugacuuuauugcacuacu

SEQ ID NO: 617 - RNA, 23 nt, Homo sapiens
cagugcaaugauauugucaaagc

SEQ ID NO: 618 - RNA, 23 nt, Homo sapiens
uaagugcuuccauguuuugguga

SEQ ID NO: 619 - RNA, 23 nt, Homo sapiens
acuuaaacguggauguacuugcu

SEQ ID NO: 620 - RNA, 23 nt, Homo sapiens
uaagugcuuccauguuuuaguag

SEQ ID NO: 621 - RNA, 22 nt, Homo sapiens
acuuuaacauggaagugcuuuc

SEQ ID NO: 622 - RNA, 23 nt, Homo sapiens
uaagugcuuccauguuucagugg

SEQ ID NO: 623 - RNA, 22 nt, Homo sapiens
uuuaacauggggguaccugcug

SEQ ID NO: 624 - RNA, 23 nt, Homo sapiens
uaagugcuuccauguuugagugu

SEQ ID NO: 625 - RNA, 22 nt, Homo sapiens
acuuuaacauggaggcacuugc

SEQ ID NO: 626 - RNA, 17 nt, Homo sapiens
uaagugcuuccaugcuu

SEQ ID NO: 627 - RNA, 17 nt, Homo sapiens
uaauugcuuccauguuu

SEQ ID NO: 628 - RNA, 23 nt, Homo sapiens
uugccacacugcaacaccuuaca

SEQ ID NO: 629 - RNA, 21 nt, Homo sapiens
ucuggcuguuguggugugcaa

SEQ ID NO: 630 - RNA, 23 nt, Homo sapiens
ucagcaccaggauauuguuggag

SEQ ID NO: 631 - RNA, 23 nt, Homo sapiens
ucaacaaaaucacugaugcugga

SEQ ID NO: 632 - RNA, 22 nt, Homo sapiens
gauaucagcucaguaggcaccg

SEQ ID NO: 633 - RNA, 21 nt, Homo sapiens
guuccugcugaacugagccag

SEQ ID NO: 634 - RNA, 22 nt, Homo sapiens
cuuucagucggauguuugcagc

SEQ ID NO: 635 - RNA, 22 nt, Homo sapiens
uguaaacauccucgacuggaag

SEQ ID NO: 636 - RNA, 22 nt, Homo sapiens
cugggagguggauguuuacuuc

SEQ ID NO: 637 - RNA, 22 nt, Homo sapiens
uguaaacauccuacacucagcu

SEQ ID NO: 638 - RNA, 22 nt, Homo sapiens
cugggagaggguuguuuacucc

SEQ ID NO: 639 - RNA, 22 nt, Homo sapiens
cugggagaaggcuguuuacucu

SEQ ID NO: 640 - RNA, 23 nt, Homo sapiens
uguaaacauccuacacucucagc

SEQ ID NO: 641 - RNA, 22 nt, Homo sapiens
cuuucagucagauguuugcugc

SEQ ID NO: 642 - RNA, 22 nt, Homo sapiens
uguaaacauccccgacuggaag

SEQ ID NO: 643 - RNA, 22 nt, Homo sapiens
cuuucagucggauguuuacagc

SEQ ID NO: 644 - RNA, 22 nt, Homo sapiens
uguaaacauccuugacuggaag

SEQ ID NO: 645 - RNA, 20 nt, Homo sapiens
auauggguuuacuaguuggu

SEQ ID NO: 646 - RNA, 22 nt, Homo sapiens
ugccuggaacauaguagggacu

SEQ ID NO: 647 - RNA, 21 nt, Homo sapiens
auaggacucauauagugccag

SEQ ID NO: 648 - RNA, 20 nt, Homo sapiens
agacacuauacgagucauau

SEQ ID NO: 649 - RNA, 23 nt, Homo sapiens
ugugacugcauuaugaaaauucu

SEQ ID NO: 650 - RNA, 20 nt, Homo sapiens
uggcuuuuaacuuugauggc

SEQ ID NO: 651 - RNA, 21 nt, Homo sapiens
cacagcaaguguagacaggca

SEQ ID NO: 652 - RNA, 21 nt, Homo sapiens
ccugucugugccugcuguaca

SEQ ID NO: 653 - RNA, 22 nt, Homo sapiens
uaaauagaguaggcaaaggaca

SEQ ID NO: 654 - RNA, 22 nt, Homo sapiens
uccuuugccuauucuauuuaag

SEQ ID NO: 655 - RNA, 22 nt, Homo sapiens
guugggacaagaggacggucuu

SEQ ID NO: 656 - RNA, 17 nt, Homo sapiens
cagagaauuguuuaauc

SEQ ID NO: 657 - RNA, 22 nt, Homo sapiens
acuuuccucacucccgugaagu

SEQ ID NO: 658 - RNA, 21 nt, Homo sapiens
uucgcgggcgaaggcaaaguc

SEQ ID NO: 659 - RNA, 20 nt, Homo sapiens
uagaggaagcuguggagaga

SEQ ID NO: 660 - RNA, 22 nt, Homo sapiens
caucuggcauccgucacacaga

SEQ ID NO: 661 - RNA, 22 nt, Homo sapiens
ugagggacagaugccagaagca

SEQ ID NO: 662 - RNA, 22 nt, Homo sapiens
uccccuucugcaggccugcugg

SEQ ID NO: 663 - RNA, 23 nt, Homo sapiens
aucagggcuuguggaaugggaag

SEQ ID NO: 664 - RNA, 23 nt, Homo sapiens
ucuggcaaguaaaaaacucucau

SEQ ID NO: 665 - RNA, 22 nt, Homo sapiens
aaacuaaucucuacacugcugc

SEQ ID NO: 666 - RNA, 22 nt, Homo sapiens
gcaguaguguagagauugguuu

SEQ ID NO: 667 - RNA, 21 nt, Homo sapiens
gcugcaccggagacuggguaa

SEQ ID NO: 668 - RNA, 21 nt, Homo sapiens
uacccagucuccggugcagcc

SEQ ID NO: 669 - RNA, 23 nt, Homo sapiens
ucgaggacugguggaagggccuu

SEQ ID NO: 670 - RNA, 24 nt, Homo sapiens
uggguagagaaggagcucagagga

SEQ ID NO: 671 - RNA, 22 nt, Homo sapiens
uaaagaacucuuaaaacccaau

SEQ ID NO: 672 - RNA, 23 nt, Homo sapiens
ugauggauaaaagacuacauauu

SEQ ID NO: 673 - RNA, 22 nt, Homo sapiens
ugccuaggcugagacugcagug

SEQ ID NO: 674 - RNA, 22 nt, Homo sapiens
ggcuggagcgagugcaguggug

SEQ ID NO: 675 - RNA, 22 nt, Homo sapiens
uggcccaaccuauucaguuagu

SEQ ID NO: 676 - RNA, 23 nt, Homo sapiens
cugacugaauagguagggucauu

SEQ ID NO: 677 - RNA, 24 nt, Homo sapiens
ucuguagccugggagcaauggggu

SEQ ID NO: 678 - RNA, 24 nt, Homo sapiens
uguggacagugagguagagggagu

SEQ ID NO: 679 - RNA, 23 nt, Homo sapiens
uaggagcucaacagaugccuguu

SEQ ID NO: 680 - RNA, 22 nt, Homo sapiens
ugcuaugccaacauauugccau

SEQ ID NO: 681 - RNA, 22 nt, Homo sapiens
agcuuuugggaauucagguagu

SEQ ID NO: 682 - RNA, 21 nt, Homo sapiens
accugaauuaccaaaagcuuu

SEQ ID NO: 683 - RNA, 19 nt, Homo sapiens
gagggcggguggaggagga

SEQ ID NO: 684 - RNA, 22 nt, Homo sapiens
aaggccuuucugaaccuucaga

SEQ ID NO: 685 - RNA, 25 nt, Homo sapiens
auaacauuguaaagcgcuucuuucg

SEQ ID NO: 686 - RNA, 22 nt, Homo sapiens
auauaccuguucggucucuuua

SEQ ID NO: 687 - RNA, 22 nt, Homo sapiens
aggggaccaaagagauauauag

SEQ ID NO: 688 - RNA, 24 nt, Homo sapiens
agauauuuugaguguuuggaauug

SEQ ID NO: 689 - RNA, 22 nt, Homo sapiens
aacuccaaacacucaaaacuca

SEQ ID NO: 690 - RNA, 22 nt, Homo sapiens
caugcuaggauagaaagaaugg

SEQ ID NO: 691 - RNA, 24 nt, Homo sapiens
gguugggcagugaggaggguguga

SEQ ID NO: 692 - RNA, 22 nt, Homo sapiens
uggaaaaaacuggugugugcuu

SEQ ID NO: 693 - RNA, 23 nt, Homo sapiens
uuuguauggauauguguguguau

SEQ ID NO: 694 - RNA, 22 nt, Homo sapiens
cuggggagauccucgagguugg

SEQ ID NO: 695 - RNA, 22 nt, Homo sapiens
caaccucgacgaucuccucagc

SEQ ID NO: 696 - RNA, 21 nt, Homo sapiens
ugaggagaucgucgagguugg

SEQ ID NO: 697 - RNA, 22 nt, Homo sapiens
caaccucgaggaucuccccagc

SEQ ID NO: 698 - RNA, 21 nt, Homo sapiens
gguggggcaaugggaucaggu

SEQ ID NO: 699 - RNA, 22 nt, Homo sapiens
uguguuagaauaggggcaauaa

SEQ ID NO: 700 - RNA, 22 nt, Homo sapiens
auugccucuguucuaacacaag

SEQ ID NO: 701 - RNA, 23 nt, Homo sapiens
ggggaaagcgaguagggacauuu

SEQ ID NO: 702 - RNA, 22 nt, Homo sapiens
cagaaggggaguugggagcaga

SEQ ID NO: 703 - RNA, 21 nt, Homo sapiens
ccaggcucugcagugggaacu

SEQ ID NO: 704 - RNA, 18 nt, Homo sapiens
ccaggcucugcaguggga

SEQ ID NO: 705 - RNA, 21 nt, Homo sapiens
cucccacuuccagaucuuucu

SEQ ID NO: 706 - RNA, 22 nt, Homo sapiens
aaagaucuggaagugggagaca

SEQ ID NO: 707 - RNA, 22 nt, Homo sapiens
cugcccuagucuagcugaagcu

SEQ ID NO: 708 - RNA, 22 nt, Homo sapiens
uucagccaggcuagugcagucu

SEQ ID NO: 709 - RNA, 22 nt, Homo sapiens
aagggcuuccucucugcaggac

SEQ ID NO: 710 - RNA, 21 nt, Homo sapiens
ccugcagagaggaagcccuuc

SEQ ID NO: 711 - RNA, 22 nt, Homo sapiens
uaggauuacaagugucggccac

SEQ ID NO: 712 - RNA, 21 nt, Homo sapiens
aggcaagaugcuggcauagcu

SEQ ID NO: 713 - RNA, 22 nt, Homo sapiens
agagcugagacuagaaagccca

SEQ ID NO: 714 - RNA, 22 nt, Homo sapiens
ggcuuucuagucucagcucucc

SEQ ID NO: 715 - RNA, 23 nt, Homo sapiens
cugauaagaacagaggcccagau

SEQ ID NO: 716 - RNA, 21 nt, Homo sapiens
ucccuaccccuccacucccca

SEQ ID NO: 717 - RNA, 23 nt, Homo sapiens
uuagggaguagaaggguggggag

SEQ ID NO: 718 - RNA, 22 nt, Homo sapiens
uauaaaaugagggcaguaagac

SEQ ID NO: 719 - RNA, 22 nt, Homo sapiens
ugugacuuuaagggaaauggcg

SEQ ID NO: 720 - RNA, 22 nt, Homo sapiens
agguggaugcaaugugaccuca

SEQ ID NO: 721 - RNA, 23 nt, Homo sapiens
cgcagacaaugccuacuggccua

SEQ ID NO: 722 - RNA, 22 nt, Homo sapiens
aggauuucagaaauacuggugu

SEQ ID NO: 723 - RNA, 17 nt, Homo sapiens
gaguucuacagucagac

SEQ ID NO: 724 - RNA, 22 nt, Homo sapiens
uaggacugugcuuggcacauag

SEQ ID NO: 725 - RNA, 22 nt, Homo sapiens
cugggguucugagacagacagu

SEQ ID NO: 726 - RNA, 24 nt, Homo sapiens
agauguauggaaucuguauauauc

SEQ ID NO: 727 - RNA, 22 nt, Homo sapiens
aaaggaggaaauaggcaggcca

SEQ ID NO: 728 - RNA, 22 nt, Homo sapiens
ugcccugccuguuuucuccuuu

SEQ ID NO: 729 - RNA, 23 nt, Homo sapiens
uagugaguuagagaugcagagcc

SEQ ID NO: 730 - RNA, 22 nt, Homo sapiens
cggggagagaacgcagugacgu

SEQ ID NO: 731 - RNA, 19 nt, Homo sapiens
acuggccugggacuaccgg

SEQ ID NO: 732 - RNA, 21 nt, Homo sapiens
ugcacggcacuggggacacgu

SEQ ID NO: 733 - RNA, 23 nt, Homo sapiens
uguguacacacgugccaggcgcu

SEQ ID NO: 734 - RNA, 17 nt, Homo sapiens
ggggcgcggccggaucg

SEQ ID NO: 735 - RNA, 22 nt, Homo sapiens
agaaggggugaaauuuaaacgu

SEQ ID NO: 736 - RNA, 19 nt, Homo sapiens
uggggcggagcuuccggag

SEQ ID NO: 737 - RNA, 22 nt, Homo sapiens
uggggcggagcuuccggaggcc

SEQ ID NO: 738 - RNA, 25 nt, Homo sapiens
cuuccagacgcuccgccccacgucg

SEQ ID NO: 739 - RNA, 19 nt, Homo sapiens
aucgggcccucggcgccgg

SEQ ID NO: 740 - RNA, 17 nt, Homo sapiens
gcuucuguaguguaguc

SEQ ID NO: 741 - RNA, 22 nt, Homo sapiens
gccucucucggagucgcucgga

SEQ ID NO: 742 - RNA, 23 nt, Homo sapiens
aaagucucgcucucugccccuca

SEQ ID NO: 743 - RNA, 24 nt, Homo sapiens
ugaggggccucagaccgagcuuuu

SEQ ID NO: 744 - RNA, 23 nt, Homo sapiens
agaagaaggcggucggucugcgg

SEQ ID NO: 745 - RNA, 21 nt, Homo sapiens
ucacgcggagagauggcuuug

SEQ ID NO: 746 - RNA, 22 nt, Homo sapiens
caggcgucugucuacguggcuu

SEQ ID NO: 747 - RNA, 20 nt, Homo sapiens
uuggccauggggcugcgcgg

SEQ ID NO: 748 - RNA, 23 nt, Homo sapiens
ccugggcagcguguggcugaagg

SEQ ID NO: 749 - RNA, 23 nt, Homo sapiens
agaggcuuugugcggauacgggg

SEQ ID NO: 750 - RNA, 21 nt, Homo sapiens
cccuugggucugaugggguag

SEQ ID NO: 751 - RNA, 25 nt, Homo sapiens
ugccccaucugugcccuggguagga

SEQ ID NO: 752 - RNA, 23 nt, Homo sapiens
uguggaagguagacggccagaga

SEQ ID NO: 753 - RNA, 20 nt, Homo sapiens
ucuggccagcuacgucccca

SEQ ID NO: 754 - RNA, 23 nt, Homo sapiens
uggggacguagcuggccagacag

SEQ ID NO: 755 - RNA, 22 nt, Homo sapiens
cucucuggccgucuaccuucca

SEQ ID NO: 756 - RNA, 23 nt, Homo sapiens
ucugggagguuguagcaguggaa

SEQ ID NO: 757 - RNA, 22 nt, Homo sapiens
uccugcguaggaucugaggagu

SEQ ID NO: 758 - RNA, 22 nt, Homo sapiens
agcucugcugcucacuggcagu

SEQ ID NO: 759 - RNA, 21 nt, Homo sapiens
ggccagccaccaggagggcug

SEQ ID NO: 760 - RNA, 17 nt, Homo sapiens
cgcgccgggcccggguu

SEQ ID NO: 761 - RNA, 18 nt, Homo sapiens
cggggcggcaggggccuc

SEQ ID NO: 762 - RNA, 23 nt, Homo sapiens
ggaggcgcaggcucggaaaggcg

SEQ ID NO: 763 - RNA, 22 nt, Homo sapiens
guggaguccuggggaauggaga

SEQ ID NO: 764 - RNA, 23 nt, Homo sapiens
agggacugccuuaggagaaaguu

SEQ ID NO: 765 - RNA, 22 nt, Homo sapiens
caccuugcgcuacucaggucug

SEQ ID NO: 766 - RNA, 22 nt, Homo sapiens
aaucugagaaggcgcacaaggu

SEQ ID NO: 767 - RNA, 17 nt, Homo sapiens
gggauaugaagaaaaau

SEQ ID NO: 768 - RNA, 22 nt, Homo sapiens
uggaagggagaagagcuuuaau

SEQ ID NO: 769 - RNA, 22 nt, Homo sapiens
aaaagcuggguugagagggcga

SEQ ID NO: 770 - RNA, 22 nt, Homo sapiens
aaaagcuggguugagagggcaa

SEQ ID NO: 771 - RNA, 20 nt, Homo sapiens
aaaagcuggguugagagggu

SEQ ID NO: 772 - RNA, 19 nt, Homo sapiens
aaaagcuggguugagagga

SEQ ID NO: 773 - RNA, 18 nt, Homo sapiens
aaagcuggguugagaagg

SEQ ID NO: 774 - RNA, 21 nt, Homo sapiens
cacauuacacggucgaccucu

SEQ ID NO: 775 - RNA, 22 nt, Homo sapiens
aggugguccguggcgcguucgc

SEQ ID NO: 776 - RNA, 22 nt, Homo sapiens
cccaauacacggucgaccucuu

SEQ ID NO: 777 - RNA, 23 nt, Homo sapiens
agguuguccguggugaguucgca

SEQ ID NO: 778 - RNA, 22 nt, Homo sapiens
caauuuagugugugugauauuu

SEQ ID NO: 779 - RNA, 20 nt, Homo sapiens
acugccccaggugcugcugg

SEQ ID NO: 780 - RNA, 23 nt, Homo sapiens
cgcauccccuagggcauuggugu

SEQ ID NO: 781 - RNA, 23 nt, Homo sapiens
ccuaguagguguccaguaagugu

SEQ ID NO: 782 - RNA, 22 nt, Homo sapiens
uauugcacauuacuaaguugca

SEQ ID NO: 783 - RNA, 20 nt, Homo sapiens
ccucugggcccuuccuccag

SEQ ID NO: 784 - RNA, 22 nt, Homo sapiens
cuggcccucucugcccuuccgu

SEQ ID NO: 785 - RNA, 22 nt, Homo sapiens
aacacaccugguuaaccucuuu

SEQ ID NO: 786 - RNA, 23 nt, Homo sapiens
gcaaagcacacggccugcagaga

SEQ ID NO: 787 - RNA, 22 nt, Homo sapiens
ucucugggccugugucuuaggc

SEQ ID NO: 788 - RNA, 21 nt, Homo sapiens
gccccugggccuauccuagaa

SEQ ID NO: 789 - RNA, 22 nt, Homo sapiens
cuagguauggucccagggaucc

SEQ ID NO: 790 - RNA, 22 nt, Homo sapiens
uuuuucauuauugcuccugacc

SEQ ID NO: 791 - RNA, 23 nt, Homo sapiens
ucaagagcaauaacgaaaaaugu

SEQ ID NO: 792 - RNA, 22 nt, Homo sapiens
cuccuauaugaugccuuucuuc

SEQ ID NO: 793 - RNA, 21 nt, Homo sapiens
gaacggcuucauacaggaguu

SEQ ID NO: 794 - RNA, 22 nt, Homo sapiens
uccagcaucagugauuuuguug

SEQ ID NO: 795 - RNA, 22 nt, Homo sapiens
aacaauauccuggugcugagug

SEQ ID NO: 796 - RNA, 23 nt, Homo sapiens
ugagcgccucgacgacagagccg

SEQ ID NO: 797 - RNA, 23 nt, Homo sapiens
ucccuguccuccaggagcucacg

SEQ ID NO: 798 - RNA, 22 nt, Homo sapiens
caauguuuccacagugcaucac

SEQ ID NO: 799 - RNA, 21 nt, Homo sapiens
gugcauuguaguugcauugca

SEQ ID NO: 800 - RNA, 22 nt, Homo sapiens
cagugccucggcagugcagccc

SEQ ID NO: 801 - RNA, 20 nt, Homo sapiens
gugcauugcuguugcauugc

SEQ ID NO: 802 - RNA, 22 nt, Homo sapiens
uccgucucaguuacuuuauagc

SEQ ID NO: 803 - RNA, 22 nt, Homo sapiens
uuauaaagcaaugagacugauu

SEQ ID NO: 804 - RNA, 23 nt, Homo sapiens
ucucacacagaaaucgcacccgu

SEQ ID NO: 805 - RNA, 21 nt, Homo sapiens
aggggugcuaucugugauuga

SEQ ID NO: 806 - RNA, 22 nt, Homo sapiens
gcccugaacgaggggucuggag

SEQ ID NO: 807 - RNA, 22 nt, Homo sapiens
gcugacuccuaguccagggcuc

SEQ ID NO: 808 - RNA, 23 nt, Homo sapiens
ugucugcccgcaugccugccucu

SEQ ID NO: 809 - RNA, 22 nt, Homo sapiens
caaucagcaaguauacugcccu

SEQ ID NO: 810 - RNA, 22 nt, Homo sapiens
uggcagugucuuagcugguugu

SEQ ID NO: 811 - RNA, 22 nt, Homo sapiens
caaucacuaacuccacugccau

SEQ ID NO: 812 - RNA, 23 nt, Homo sapiens
uaggcagugucauuagcugauug

SEQ ID NO: 813 - RNA, 22 nt, Homo sapiens
aaucacuaaccacacggccagg

SEQ ID NO: 814 - RNA, 23 nt, Homo sapiens
aggcaguguaguuagcugauugc

SEQ ID NO: 815 - RNA, 24 nt, Homo sapiens
aacaacaaaaucacuagucuucca

SEQ ID NO: 816 - RNA, 22 nt, Homo sapiens
agguagacugggauuuguuguu

SEQ ID NO: 817 - RNA, 22 nt, Homo sapiens
aaacaccauugucacacuccac

SEQ ID NO: 818 - RNA, 23 nt, Homo sapiens
uuuagugugauaauggcguuuga

SEQ ID NO: 819 - RNA, 23 nt, Homo sapiens
ccuccguguuaccuguccucuag

SEQ ID NO: 820 - RNA, 23 nt, Homo sapiens
ugaggauggauagcaaggaagcc

SEQ ID NO: 821 - RNA, 21 nt, Homo sapiens
aaaauuucuuucacuacuuag

SEQ ID NO: 822 - RNA, 21 nt, Homo sapiens
uuagugaaggcuauuuuaauu

SEQ ID NO: 823 - RNA, 20 nt, Homo sapiens
acuguaaacgcuuucugaug

SEQ ID NO: 824 - RNA, 22 nt, Homo sapiens
gcaugugaugaagcaaaucagu

SEQ ID NO: 825 - RNA, 24 nt, Homo sapiens
caaagugaugaguaauacuggcug

SEQ ID NO: 826 - RNA, 20 nt, Homo sapiens
gaaucggaaaggaggcgccg

SEQ ID NO: 827 - RNA, 21 nt, Homo sapiens
uugugaagaaagaaauucuua

SEQ ID NO: 828 - RNA, 22 nt, Homo sapiens
aggaggcaucuugagaaaugga

SEQ ID NO: 829 - RNA, 24 nt, Homo sapiens
acaaaaaaaaaagcccaacccuuc

SEQ ID NO: 830 - RNA, 22 nt, Homo sapiens
uguuguacuuuuuuuuuuguuc

SEQ ID NO: 831 - RNA, 23 nt, Homo sapiens
ucccccaggugugauucugauuu

SEQ ID NO: 832 - RNA, 23 nt, Homo sapiens
uagccuucagaucuugguguuuu

SEQ ID NO: 833 - RNA, 23 nt, Homo sapiens
ccacuuggaucugaaggcugccc

SEQ ID NO: 834 - RNA, 21 nt, Homo sapiens
ucucucggcuccucgcggcuc

SEQ ID NO: 835 - RNA, 22 nt, Homo sapiens
uuaucagaaucuccagggguac

SEQ ID NO: 836 - RNA, 23 nt, Homo sapiens
cgagggcauuucaugaugcaggc

SEQ ID NO: 837 - RNA, 22 nt, Homo sapiens
augaagugcacucaugauaugu

SEQ ID NO: 838 - RNA, 23 nt, Homo sapiens
caucagcacccuauguccuuucu

SEQ ID NO: 839 - RNA, 22 nt, Homo sapiens
aaagacauaguugcaagauggg

SEQ ID NO: 840 - RNA, 22 nt, Homo sapiens
ugucuacauuaaugaaaagagc

SEQ ID NO: 841 - RNA, 22 nt, Homo sapiens
gggaccauccugccugcugugg

SEQ ID NO: 842 - RNA, 22 nt, Homo sapiens
ucagcaggcaggcuggugcagc

SEQ ID NO: 843 - RNA, 22 nt, Homo sapiens
ucacccugcaucccgcacccag

SEQ ID NO: 844 - RNA, 22 nt, Homo sapiens
gugggcugggcugggcugggcc

SEQ ID NO: 845 - RNA, 20 nt, Homo sapiens
cgcgggucggggucugcagg

SEQ ID NO: 846 - RNA, 22 nt, Homo sapiens
ucaccugaccucccaugccugu

SEQ ID NO: 847 - RNA, 22 nt, Homo sapiens
caggcacgggagcucaggugag

SEQ ID NO: 848 - RNA, 21 nt, Homo sapiens
ucaccugagcucccgugccug

SEQ ID NO: 849 - RNA, 20 nt, Homo sapiens
aggcaugggaggucagguga

SEQ ID NO: 850 - RNA, 22 nt, Homo sapiens
aacacaccuauucaaggauuca

SEQ ID NO: 851 - RNA, 24 nt, Homo sapiens
aauccuuggaaccuaggugugagu

SEQ ID NO: 852 - RNA, 22 nt, Homo sapiens
aauugcacgguauccaucugua

SEQ ID NO: 853 - RNA, 22 nt, Homo sapiens
cggguggaucacgaugcaauuu

SEQ ID NO: 854 - RNA, 22 nt, Homo sapiens
aaaaugaaaugagcccagccca

SEQ ID NO: 855 - RNA, 21 nt, Homo sapiens
agccgcggggaucgccgaggg

SEQ ID NO: 856 - RNA, 19 nt, Homo sapiens
agggaccugagugucuaag

SEQ ID NO: 857 - RNA, 19 nt, Homo sapiens
aggugugucuguagagucc

SEQ ID NO: 858 - RNA, 24 nt, Homo sapiens
cauagcccggucgcugguacauga

SEQ ID NO: 859 - RNA, 18 nt, Homo sapiens
cggcuggaggugugagga

SEQ ID NO: 860 - RNA, 18 nt, Homo sapiens
cuaagaaguugacugaag

SEQ ID NO: 861 - RNA, 19 nt, Homo sapiens
gacuggacaagcugaggaa

SEQ ID NO: 862 - RNA, 21 nt, Homo sapiens
gcuugucgcugcgguguugcu

SEQ ID NO: 863 - RNA, 17 nt, Homo sapiens
ggcgggugcgggggugg

SEQ ID NO: 864 - RNA, 21 nt, Homo sapiens
ugugucccauuauuggugauu

SEQ ID NO: 865 - RNA, 22 nt, Homo sapiens
uuuaagaaaacaccauggagau

SEQ ID NO: 866 - RNA, 21 nt, Homo sapiens
ugaguguugucuacgagggca

SEQ ID NO: 867 - RNA, 22 nt, Homo sapiens
uaaugccccuaaaaauccuuau

SEQ ID NO: 868 - RNA, 23 nt, Homo sapiens
agggacuuuugggggcagaugug

SEQ ID NO: 869 - RNA, 22 nt, Homo sapiens
uaaugccccuaaaaauccuuau

SEQ ID NO: 870 - RNA, 22 nt, Homo sapiens
agggacuuucaggggcagcugu

SEQ ID NO: 871 - RNA, 21 nt, Homo sapiens
acugacaggagagcauuuuga

SEQ ID NO: 872 - RNA, 22 nt, Homo sapiens
ugaccugggacucggacagcug

SEQ ID NO: 873 - RNA, 24 nt, Homo sapiens
gaaaaugaugaguagugacugaug

SEQ ID NO: 874 - RNA, 23 nt, Homo sapiens
ugagcaccacacaggccgggcgc

SEQ ID NO: 875 - RNA, 21 nt, Homo sapiens
gcuggucugcguggugcucgg

SEQ ID NO: 876 - RNA, 22 nt, Homo sapiens
ucucaggaguaaagacagaguu

SEQ ID NO: 877 - RNA, 22 nt, Homo sapiens
aacucugucuucacucaugagu

SEQ ID NO: 878 - RNA, 18 nt, Homo sapiens
agcaggugcggggcggcg

SEQ ID NO: 879 - RNA, 21 nt, Homo sapiens
cagugcaaguguagaugccga

SEQ ID NO: 880 - RNA, 22 nt, Homo sapiens
accuuccucuccaugggucuuu

SEQ ID NO: 881 - RNA, 22 nt, Homo sapiens
aaagacccauugaggagaaggu

SEQ ID NO: 882 - RNA, 21 nt, Homo sapiens
aauguagagauugaucaaaau

SEQ ID NO: 883 - RNA, 23 nt, Homo sapiens
acggaauauguauacggaauaua

SEQ ID NO: 884 - RNA, 24 nt, Homo sapiens
agagcucacagcuguccuucucua

SEQ ID NO: 885 - RNA, 22 nt, Homo sapiens
aucaaauaaggacuagucugca

SEQ ID NO: 886 - RNA, 23 nt, Homo sapiens
augagacucauguaaaacaucuu

SEQ ID NO: 887 - RNA, 21 nt, Homo sapiens
auggaauguauauacggaaua

SEQ ID NO: 888 - RNA, 22 nt, Homo sapiens
aauugcacuuuagcaaugguga

SEQ ID NO: 889 - RNA, 22 nt, Homo sapiens
auuguagaaccuaagauuggcc

SEQ ID NO: 890 - RNA, 22 nt, Homo sapiens
caucucuaaggaacucccccaa

SEQ ID NO: 891 - RNA, 23 nt, Homo sapiens
uauggggcuucuguagagauuuc

SEQ ID NO: 892 - RNA, 22 nt, Homo sapiens
acuguugcuaauaugcaacucu

SEQ ID NO: 893 - RNA, 20 nt, Homo sapiens
ccguguuucccccacgcuuu

SEQ ID NO: 894 - RNA, 15 nt, Homo sapiens
aggagauccuggguu

SEQ ID NO: 895 - RNA, 22 nt, Homo sapiens
cucgugggcucuggccacggcc

SEQ ID NO: 896 - RNA, 22 nt, Homo sapiens
caguggccagagcccugcagug

SEQ ID NO: 897 - RNA, 22 nt, Homo sapiens
cugcagaguuuguacggaccgg

SEQ ID NO: 898 - RNA, 20 nt, Homo sapiens
uccguacaaacucugcugug

SEQ ID NO: 899 - RNA, 22 nt, Homo sapiens
cuuccccccaguaaucuucauc

SEQ ID NO: 900 - RNA, 23 nt, Homo sapiens
ugaggauauggcagggaagggga

SEQ ID NO: 901 - RNA, 23 nt, Homo sapiens
uuuugcaugacccugggaguagg

SEQ ID NO: 902 - RNA, 22 nt, Homo sapiens
gacucacucacaggauugugca

SEQ ID NO: 903 - RNA, 22 nt, Homo sapiens
acacagugcuucauccacuacu

SEQ ID NO: 904 - RNA, 22 nt, Homo sapiens
uaguggaugaugcacucugugc

SEQ ID NO: 905 - RNA, 21 nt, Homo sapiens
ugaugauacagguggagguag

SEQ ID NO: 906 - RNA, 22 nt, Homo sapiens
cuacuucuaccuguguuaucau

SEQ ID NO: 907 - RNA, 22 nt, Homo sapiens
ugcgacauuggaaguaguauca

SEQ ID NO: 908 - RNA, 21 nt, Homo sapiens
uuagaccuaguacacguccuu

SEQ ID NO: 909 - RNA, 22 nt, Homo sapiens
uuuccuacccuaccugaagacu

SEQ ID NO: 910 - RNA, 22 nt, Homo sapiens
aucuguaagagaaaguaaauga

SEQ ID NO: 911 - RNA, 24 nt, Homo sapiens
cccggacaggcguucgugcgacgu

SEQ ID NO: 912 - RNA, 22 nt, Homo sapiens
uauggaaagacuuugccacucu

SEQ ID NO: 913 - RNA, 21 nt, Homo sapiens
aguggcaaagucuuuccauau

SEQ ID NO: 914 - RNA, 22 nt, Homo sapiens
cugggaggugugauaucguggu

SEQ ID NO: 915 - RNA, 22 nt, Homo sapiens
ugugauaucaugguuccuggga

SEQ ID NO: 916 - RNA, 22 nt, Homo sapiens
cugggaggugugauauuguggu

SEQ ID NO: 917 - RNA, 22 nt, Homo sapiens
ugugauaucaugguuccuggga

SEQ ID NO: 918 - RNA, 22 nt, Homo sapiens
cugggaggugugauauuguggu

SEQ ID NO: 919 - RNA, 22 nt, Homo sapiens
gggaggugugaucucacacucg

SEQ ID NO: 920 - RNA, 22 nt, Homo sapiens
ugugauaucaugguuccuggga

SEQ ID NO: 921 - RNA, 22 nt, Homo sapiens
ugugauaucgugcuuccuggga

SEQ ID NO: 922 - RNA, 23 nt, Homo sapiens
accuggacccagcguagacaaag

SEQ ID NO: 923 - RNA, 22 nt, Homo sapiens
accaagucugcgucauccucuc

SEQ ID NO: 924 - RNA, 23 nt, Homo sapiens
aguggaugauggagacucgguac

SEQ ID NO: 925 - RNA, 24 nt, Homo sapiens
guuccacacugacacugcagaagu

SEQ ID NO: 926 - RNA, 24 nt, Homo sapiens
ccugcuggucaggaguggauacug

SEQ ID NO: 927 - RNA, 21 nt, Homo sapiens
aauaauacaugguugaucuuu

SEQ ID NO: 928 - RNA, 22 nt, Homo sapiens
agaucgaccguguuauauucgc

SEQ ID NO: 929 - RNA, 22 nt, Homo sapiens
gccugcugggguggaaccuggu

SEQ ID NO: 930 - RNA, 20 nt, Homo sapiens
gguauccguuuggggauggu

SEQ ID NO: 931 - RNA, 22 nt, Homo sapiens
gaaggcagcagugcuccccugu

SEQ ID NO: 932 - RNA, 23 nt, Homo sapiens
aagugccgccaucuuuugagugu

SEQ ID NO: 933 - RNA, 20 nt, Homo sapiens
acucaaacugugggggcacu

SEQ ID NO: 934 - RNA, 23 nt, Homo sapiens
aagugcccccacaguuugagugc

SEQ ID NO: 935 - RNA, 22 nt, Homo sapiens
acucaaaagauggcggcacuuu

SEQ ID NO: 936 - RNA, 23 nt, Homo sapiens
aaagugcugcgacauuugagcgu

SEQ ID NO: 937 - RNA, 23 nt, Homo sapiens
gaagugcuucgauuuuggggugu

SEQ ID NO: 938 - RNA, 22 nt, Homo sapiens
acucaaaaugggggcgcuuucc

SEQ ID NO: 939 - RNA, 22 nt, Homo sapiens
cuuaucagauuguauuguaauu

SEQ ID NO: 940 - RNA, 22 nt, Homo sapiens
uuauaauacaaccugauaagug

SEQ ID NO: 941 - RNA, 22 nt, Homo sapiens
cuuagcagguuguauuaucauu

SEQ ID NO: 942 - RNA, 22 nt, Homo sapiens
auauaauacaaccugcuaagug

SEQ ID NO: 943 - RNA, 22 nt, Homo sapiens
cacuuagcagguuguauuauau

SEQ ID NO: 944 - RNA, 22 nt, Homo sapiens
auaauacaaccugcuaagugcu

SEQ ID NO: 945 - RNA, 22 nt, Homo sapiens
uuuguucguucggcucgcguga

SEQ ID NO: 946 - RNA, 21 nt, Homo sapiens
gguagauuuuccuucuauggu

SEQ ID NO: 947 - RNA, 21 nt, Homo sapiens
aucauagaggaaaauccacgu

SEQ ID NO: 948 - RNA, 22 nt, Homo sapiens
guagauucuccuucuaugagua

SEQ ID NO: 949 - RNA, 22 nt, Homo sapiens
aucauagaggaaaauccauguu

SEQ ID NO: 950 - RNA, 22 nt, Homo sapiens
cguggauauuccuucuauguuu

SEQ ID NO: 951 - RNA, 21 nt, Homo sapiens
aacauagaggaaauuccacgu

SEQ ID NO: 952 - RNA, 21 nt, Homo sapiens
gguggauauuccuucuauguu

SEQ ID NO: 953 - RNA, 22 nt, Homo sapiens
aucacacaaaggcaacuuuugu

SEQ ID NO: 954 - RNA, 22 nt, Homo sapiens
agagguugcccuuggugaauuc

SEQ ID NO: 955 - RNA, 21 nt, Homo sapiens
acuggacuuggagucagaagg

SEQ ID NO: 956 - RNA, 22 nt, Homo sapiens
cuccugacuccagguccugugu

SEQ ID NO: 957 - RNA, 19 nt, Homo sapiens
acuggacuuggaggcagaa

SEQ ID NO: 958 - RNA, 25 nt, Homo sapiens
acuggacuuggagucagaagagugg

SEQ ID NO: 959 - RNA, 20 nt, Homo sapiens
acuggacuuggagucagaaa

SEQ ID NO: 960 - RNA, 19 nt, Homo sapiens
acuggacuuggagucagga

SEQ ID NO: 961 - RNA, 20 nt, Homo sapiens
acuggacuuggagccagaag

SEQ ID NO: 962 - RNA, 20 nt, Homo sapiens
acugggcuuggagucagaag

SEQ ID NO: 963 - RNA, 21 nt, Homo sapiens
acuggacuuggugucagaugg

SEQ ID NO: 964 - RNA, 21 nt, Homo sapiens
acuggacuaggagucagaagg

SEQ ID NO: 965 - RNA, 19 nt, Homo sapiens
acuggauuuggagccagaa

SEQ ID NO: 966 - RNA, 22 nt, Homo sapiens
uauguaacaugguccacuaacu

SEQ ID NO: 967 - RNA, 21 nt, Homo sapiens
ugguagacuauggaacguagg

SEQ ID NO: 968 - RNA, 22 nt, Homo sapiens
uauguaauaugguccacaucuu

SEQ ID NO: 969 - RNA, 22 nt, Homo sapiens
ugguugaccauagaacaugcgc

SEQ ID NO: 970 - RNA, 22 nt, Homo sapiens
uauacaagggcaagcucucugu

SEQ ID NO: 971 - RNA, 22 nt, Homo sapiens
agcgagguugcccuuuguauau

SEQ ID NO: 972 - RNA, 21 nt, Homo sapiens
aaucauucacggacaacacuu

SEQ ID NO: 973 - RNA, 22 nt, Homo sapiens
gaaguuguucgugguggauucg

SEQ ID NO: 974 - RNA, 22 nt, Homo sapiens
agaucagaaggugauuguggcu

SEQ ID NO: 975 - RNA, 20 nt, Homo sapiens
auuccuagaaauuguucaua

SEQ ID NO: 976 - RNA, 22 nt, Homo sapiens
aggugcuccaggcuggcucaca

SEQ ID NO: 977 - RNA, 22 nt, Homo sapiens
gagcaauguagguagacuguuu

SEQ ID NO: 978 - RNA, 22 nt, Homo sapiens
uguccucuagggccugcagucu

SEQ ID NO: 979 - RNA, 20 nt, Homo sapiens
aaaggcauaaaaccaagaca

SEQ ID NO: 980 - RNA, 22 nt, Homo sapiens
uguguggauccuggaggaggca

SEQ ID NO: 981 - RNA, 21 nt, Homo sapiens
uaacgcauaauauggacaugu

SEQ ID NO: 982 - RNA, 22 nt, Homo sapiens
agacaucaagaucagucccaaa

SEQ ID NO: 983 - RNA, 22 nt, Homo sapiens
uuugggacugaucuugaugucu

SEQ ID NO: 984 - RNA, 22 nt, Homo sapiens
aaggaaccagaaaaugagaagu

SEQ ID NO: 985 - RNA, 22 nt, Homo sapiens
uugaggaaaagauggucuuauu

SEQ ID NO: 986 - RNA, 26 nt, Homo sapiens
aagaggaagaaauggcugguucucag

SEQ ID NO: 987 - RNA, 20 nt, Homo sapiens
gcucggacugagcagguggg

SEQ ID NO: 988 - RNA, 21 nt, Homo sapiens
acagggccgcagauggagacu

SEQ ID NO: 989 - RNA, 21 nt, Homo sapiens
gcagagaacaaaggacucagu

SEQ ID NO: 990 - RNA, 22 nt, Homo sapiens
acugauuaucuuaacucucuga

SEQ ID NO: 991 - RNA, 23 nt, Homo sapiens
ucucugaguaccauaugccuugu

SEQ ID NO: 992 - RNA, 22 nt, Homo sapiens
ucuggccuugacuugacucuuu

SEQ ID NO: 993 - RNA, 23 nt, Homo sapiens
ucaaggccagaggucccacagca

SEQ ID NO: 994 - RNA, 22 nt, Homo sapiens
aacuaguaauguuggauuaggg

SEQ ID NO: 995 - RNA, 22 nt, Homo sapiens
auauguauaugugacugcuacu

SEQ ID NO: 996 - RNA, 21 nt, Homo sapiens
acuccaguuuuaguucucuug

SEQ ID NO: 997 - RNA, 22 nt, Homo sapiens
aagagaacugaaaguggagccu

SEQ ID NO: 998 - RNA, 21 nt, Homo sapiens
uggccaaaaagcaggcagaga

SEQ ID NO: 999 - RNA, 22 nt, Homo sapiens
cagguagauauuugauaggcau

SEQ ID NO: 1000 - RNA, 21 nt, Homo sapiens
gccuaucacauaucugccugu

SEQ ID NO: 1001 - RNA, 22 nt, Homo sapiens
ggaggaaccuuggagcuucggc

SEQ ID NO: 1002 - RNA, 23 nt, Homo sapiens
gaggcugaugugaguagaccacu

SEQ ID NO: 1003 - RNA, 22 nt, Homo sapiens
ugcucagguugcacagcuggga

SEQ ID NO: 1004 - RNA, 22 nt, Homo sapiens
ucagguguggaaacugaggcag

SEQ ID NO: 1005 - RNA, 22 nt, Homo sapiens
uguagauacgagcaccagccac

SEQ ID NO: 1006 - RNA, 22 nt, Homo sapiens
uaagggguguauggcagaugca

SEQ ID NO: 1007 - RNA, 23 nt, Homo sapiens
acaggcggcuguagcaauggggg

SEQ ID NO: 1008 - RNA, 22 nt, Homo sapiens
aauucccuuguagauaacccgg

SEQ ID NO: 1009 - RNA, 22 nt, Homo sapiens
uacgcgcagaccacaggauguc

SEQ ID NO: 1010 - RNA, 22 nt, Homo sapiens
cagcccggaucccagcccacuu

SEQ ID NO: 1011 - RNA, 20 nt, Homo sapiens
guggguuggggcgggcucug

SEQ ID NO: 1012 - RNA, 22 nt, Homo sapiens
uuacacacaacugaggaucaua

SEQ ID NO: 1013 - RNA, 21 nt, Homo sapiens
uuucagauaacaguauuacau

SEQ ID NO: 1014 - RNA, 22 nt, Homo sapiens
aagcaauacuguuaccugaaau

SEQ ID NO: 1015 - RNA, 23 nt, Homo sapiens
uagcccccaggcuucacuuggcg

SEQ ID NO: 1016 - RNA, 23 nt, Homo sapiens
uucgggcuggccugcugcuccgg

SEQ ID NO: 1017 - RNA, 21 nt, Homo sapiens
ugugcagcaggccaaccgaga

SEQ ID NO: 1018 - RNA, 23 nt, Homo sapiens
agggcauaggagaggguugauau

SEQ ID NO: 1019 - RNA, 20 nt, Homo sapiens
ggcggcggcggaggcggggg

SEQ ID NO: 1020 - RNA, 22 nt, Homo sapiens
cugccagccccguuccagggca

SEQ ID NO: 1021 - RNA, 23 nt, Homo sapiens
acaaaguacagcauuagccuuag

SEQ ID NO: 1022 - RNA, 23 nt, Homo sapiens
aaaggucauuguaagguuaaugc

SEQ ID NO: 1023 - RNA, 22 nt, Homo sapiens
ugaggcuaaugcacuacuucac

SEQ ID NO: 1024 - RNA, 24 nt, Homo sapiens
uauagagagcaggaagauuaaugu

SEQ ID NO: 1025 - RNA, 23 nt, Homo sapiens
gugcuucaucguaauuaaccuua

SEQ ID NO: 1026 - RNA, 24 nt, Homo sapiens
guggaaagcaugcauccagggugu

SEQ ID NO: 1027 - RNA, 22 nt, Homo sapiens
gaauguugcucggugaaccccu

SEQ ID NO: 1028 - RNA, 23 nt, Homo sapiens
agguuacccgagcaacuuugcau

SEQ ID NO: 1029 - RNA, 21 nt, Homo sapiens
aauauaacacagauggccugu

SEQ ID NO: 1030 - RNA, 22 nt, Homo sapiens
uauguaacacgguccacuaacc

SEQ ID NO: 1031 - RNA, 21 nt, Homo sapiens
uaguagaccguauagcguacg

SEQ ID NO: 1032 - RNA, 23 nt, Homo sapiens
acuucaccugguccacuagccgu

SEQ ID NO: 1033 - RNA, 23 nt, Homo sapiens
aucaacagacauuaauugggcgc

SEQ ID NO: 1034 - RNA, 22 nt, Homo sapiens
acuggacuuagggucagaaggc

SEQ ID NO: 1035 - RNA, 23 nt, Homo sapiens
agcucggucugaggccccucagu

SEQ ID NO: 1036 - RNA, 23 nt, Homo sapiens
ugaggggcagagagcgagacuuu

SEQ ID NO: 1037 - RNA, 21 nt, Homo sapiens
caaaacgugaggcgcugcuau

SEQ ID NO: 1038 - RNA, 22 nt, Homo sapiens
cagcagcaauucauguuuugaa

SEQ ID NO: 1039 - RNA, 17 nt, Homo sapiens
ccugagaaaagggccaa

SEQ ID NO: 1040 - RNA, 19 nt, Homo sapiens
ggccacugagucagcacca

SEQ ID NO: 1041 - RNA, 18 nt, Homo sapiens
agggcauguccagggggu

SEQ ID NO: 1042 - RNA, 22 nt, Homo sapiens
aucgggaaugucguguccgccc

SEQ ID NO: 1043 - RNA, 23 nt, Homo sapiens
gccuggagcuacuccaccaucuc

SEQ ID NO: 1044 - RNA, 17 nt, Homo sapiens
caguguucagagaugga

SEQ ID NO: 1045 - RNA, 23 nt, Homo sapiens
aaugacacgaucacucccguuga

SEQ ID NO: 1046 - RNA, 18 nt, Homo sapiens
aucugaccugaugaaggu

SEQ ID NO: 1047 - RNA, 18 nt, Homo sapiens
ccagagguggggacugag

SEQ ID NO: 1048 - RNA, 17 nt, Homo sapiens
ccccgccaccgccuugg

SEQ ID NO: 1049 - RNA, 22 nt, Homo sapiens
caguugggucuaggggucagga

SEQ ID NO: 1050 - RNA, 19 nt, Homo sapiens
cuuggggcauggaguccca

SEQ ID NO: 1051 - RNA, 16 nt, Homo sapiens
aggaaacagggaccca

SEQ ID NO: 1052 - RNA, 17 nt, Homo sapiens
gacauucagacuaccug

SEQ ID NO: 1053 - RNA, 18 nt, Homo sapiens
auucuaagugccuuggcc

SEQ ID NO: 1054 - RNA, 17 nt, Homo sapiens
acucagucauggucauu

SEQ ID NO: 1055 - RNA, 19 nt, Homo sapiens
cugugggcucagcucuggg

SEQ ID NO: 1056 - RNA, 16 nt, Homo sapiens
cuaggaggccuuggcc

SEQ ID NO: 1057 - RNA, 16 nt, Homo sapiens
uccagcucgguggcac

SEQ ID NO: 1058 - RNA, 21 nt, Homo sapiens
ggcuccuccucucaggaugug

SEQ ID NO: 1059 - RNA, 21 nt, Homo sapiens
gcaggcacagacagcccuggc

SEQ ID NO: 1060 - RNA, 20 nt, Homo sapiens
ucagggagucaggggagggc

SEQ ID NO: 1061 - RNA, 19 nt, Homo sapiens
gggggaagaaaaggugggg

SEQ ID NO: 1062 - RNA, 18 nt, Homo sapiens
cauucaacuagugauugu

SEQ ID NO: 1063 - RNA, 18 nt, Homo sapiens
guguucucugauggacag

SEQ ID NO: 1064 - RNA, 18 nt, Homo sapiens
cagcagucccucccccug

SEQ ID NO: 1065 - RNA, 17 nt, Homo sapiens
ccaauuaccacuucuuu

SEQ ID NO: 1066 - RNA, 17 nt, Homo sapiens
cucagugacucaugugc

SEQ ID NO: 1067 - RNA, 21 nt, Homo sapiens
gcaguucugagcacaguacac

SEQ ID NO: 1068 - RNA, 18 nt, Homo sapiens
cuaggggguuugcccuug

SEQ ID NO: 1069 - RNA, 16 nt, Homo sapiens
cucuccucccggcuuc

SEQ ID NO: 1070 - RNA, 21 nt, Homo sapiens
gaguguaguucugagcagagc

SEQ ID NO: 1071 - RNA, 18 nt, Homo sapiens
gggucccggggagggggg

SEQ ID NO: 1072 - RNA, 18 nt, Homo sapiens
uaaaauuugcauccagga

SEQ ID NO: 1073 - RNA, 17 nt, Homo sapiens
uggggcucagcgaguuu

SEQ ID NO: 1074 - RNA, 18 nt, Homo sapiens
gggcucacaucaccccau

SEQ ID NO: 1075 - RNA, 18 nt, Homo sapiens
gcggcgaguccgacucau

SEQ ID NO: 1076 - RNA, 17 nt, Homo sapiens
accccacuccugguacc

SEQ ID NO: 1077 - RNA, 19 nt, Homo sapiens
ucucccuugagggcacuuu

SEQ ID NO: 1078 - RNA, 17 nt, Homo sapiens
uugucugcugaguuucc

SEQ ID NO: 1079 - RNA, 19 nt, Homo sapiens
gcauugugcagggcuauca

SEQ ID NO: 1080 - RNA, 22 nt, Homo sapiens
uaauacugucugguaaaaccgu

SEQ ID NO: 1081 - RNA, 19 nt, Homo sapiens
ugcccuccuuucuucccuc

SEQ ID NO: 1082 - RNA, 16 nt, Homo sapiens
uucagcaggaacagcu

SEQ ID NO: 1083 - RNA, 18 nt, Homo sapiens
ccccugggccggccuugg

SEQ ID NO: 1084 - RNA, 17 nt, Homo sapiens
cagccugacaggaacag

SEQ ID NO: 1085 - RNA, 17 nt, Homo sapiens
gggagucuacagcaggg

SEQ ID NO: 1086 - RNA, 18 nt, Homo sapiens
cagugcaauguuuuccuu

SEQ ID NO: 1087 - RNA, 17 nt, Homo sapiens
augugggcucaggcuca

SEQ ID NO: 1088 - RNA, 16 nt, Homo sapiens
ugccuuccugucugug

SEQ ID NO: 1089 - RNA, 22 nt, Homo sapiens
cugggacaggaggaggaggcag

SEQ ID NO: 1090 - RNA, 18 nt, Homo sapiens
gcuggugacaugagaggc

SEQ ID NO: 1091 - RNA, 18 nt, Homo sapiens
ugggagcuggacuacuuc

SEQ ID NO: 1092 - RNA, 20 nt, Homo sapiens
ucccacuacuucacuuguga

SEQ ID NO: 1093 - RNA, 18 nt, Homo sapiens
ccaguguggcucagcgag

SEQ ID NO: 1094 - RNA, 17 nt, Homo sapiens
uucugagcugaggacag

SEQ ID NO: 1095 - RNA, 17 nt, Homo sapiens
ccggcauguccagggca

SEQ ID NO: 1096 - RNA, 18 nt, Homo sapiens
ccuagacaccuccaguuc

SEQ ID NO: 1097 - RNA, 17 nt, Homo sapiens
uggagagaaaggcagua

SEQ ID NO: 1098 - RNA, 19 nt, Homo sapiens
aauguuuuuuccuguuucc

SEQ ID NO: 1099 - RNA, 18 nt, Homo sapiens
ucccuggaguuucuucuu

SEQ ID NO: 1100 - RNA, 18 nt, Homo sapiens
cuggagucuaggauucca

SEQ ID NO: 1101 - RNA, 16 nt, Homo sapiens
gcagcauucauguccc

SEQ ID NO: 1102 - RNA, 18 nt, Homo sapiens
gaaagagagcugagugug

SEQ ID NO: 1103 - RNA, 19 nt, Homo sapiens
ggccuuguuccugucccca

SEQ ID NO: 1104 - RNA, 20 nt, Homo sapiens
agcccccuggccccaaaccc

SEQ ID NO: 1105 - RNA, 22 nt, Homo sapiens
caggucgucuugcagggcuucu

SEQ ID NO: 1106 - RNA, 18 nt, Homo sapiens
cucugggaaaugggacag

SEQ ID NO: 1107 - RNA, 18 nt, Homo sapiens
ccgcuuucugagcuggac

SEQ ID NO: 1108 - RNA, 21 nt, Homo sapiens
ugucuugcaggccgucaugca

SEQ ID NO: 1109 - RNA, 17 nt, Homo sapiens
ggugaggcuagcuggug

SEQ ID NO: 1110 - RNA, 17 nt, Homo sapiens
acauugccagggaguuu

SEQ ID NO: 1111 - RNA, 17 nt, Homo sapiens
cacuguggguacaugcu

SEQ ID NO: 1112 - RNA, 17 nt, Homo sapiens
ucccugagcaaagccac

SEQ ID NO: 1113 - RNA, 18 nt, Homo sapiens
gggauucuguagcuuccu

SEQ ID NO: 1114 - RNA, 21 nt, Homo sapiens
uuagcgguggaccgcccugcg

SEQ ID NO: 1115 - RNA, 21 nt, Homo sapiens
cugugggcucagcgcgugggg

SEQ ID NO: 1116 - RNA, 18 nt, Homo sapiens
cagccccacagccucaga

SEQ ID NO: 1117 - RNA, 21 nt, Homo sapiens
cuggauggcuccuccaugucu

SEQ ID NO: 1118 - RNA, 20 nt, Homo sapiens
cccugagacccuaaccuuaa

SEQ ID NO: 1119 - RNA, 18 nt, Homo sapiens
uugcacuugucucaguga

SEQ ID NO: 1120 - RNA, 23 nt, Homo sapiens
ucuuggaguaggucauugggugg

SEQ ID NO: 1121 - RNA, 20 nt, Homo sapiens
uguuccucugucucccagac

SEQ ID NO: 1122 - RNA, 19 nt, Homo sapiens
ggcuugcaugggggacugg

SEQ ID NO: 1123 - RNA, 17 nt, Homo sapiens
ccaguuuucccaggauu

SEQ ID NO: 1124 - RNA, 19 nt, Homo sapiens
ccugagacccuaguuccac

SEQ ID NO: 1125 - RNA, 22 nt, Homo sapiens
aucaugaugggcuccucggugu

SEQ ID NO: 1126 - RNA, 19 nt, Homo sapiens
ccucagaucagagccuugc

SEQ ID NO: 1127 - RNA, 18 nt, Homo sapiens
ggugggcuucccggaggg

SEQ ID NO: 1128 - RNA, 18 nt, Homo sapiens
cacugcaggacucagcag

SEQ ID NO: 1129 - RNA, 17 nt, Homo sapiens
ugagggaggagacugca

SEQ ID NO: 1130 - RNA, 18 nt, Homo sapiens
gaggcugaaggaagaugg

SEQ ID NO: 1131 - RNA, 22 nt, Homo sapiens
gucacugaugucuguagcugag

SEQ ID NO: 1132 - RNA, 22 nt, Homo sapiens
accugucuguggaaaggagcua

SEQ ID NO: 1133 - RNA, 21 nt, Homo sapiens
aaaagcaucaggaaguaccca

SEQ ID NO: 1134 - RNA, 21 nt, Homo sapiens
auaggcaccaaaaagcaacaa

SEQ ID NO: 1135 - RNA, 22 nt, Homo sapiens
aguugccuuuuuguucccaugc

SEQ ID NO: 1136 - RNA, 22 nt, Homo sapiens
agaguuaacucaaaauggacua

SEQ ID NO: 1137 - RNA, 22 nt, Homo sapiens
uguugggauucagcaggaccau

SEQ ID NO: 1138 - RNA, 17 nt, Homo sapiens
gaagauggacguacuuu

SEQ ID NO: 1139 - RNA, 21 nt, Homo sapiens
ucugaauagagucugaagagu

SEQ ID NO: 1140 - RNA, 22 nt, Homo sapiens
caaggagacgggaacauggagc

SEQ ID NO: 1141 - RNA, 20 nt, Homo sapiens
aaaagcugggcugagaggcg

SEQ ID NO: 1142 - RNA, 18 nt, Homo sapiens
aggcuggagugagcggag

SEQ ID NO: 1143 - RNA, 22 nt, Homo sapiens
gcgacucugaaaacuagaaggu

SEQ ID NO: 1144 - RNA, 20 nt, Homo sapiens
aaagacucugcaagaugccu

SEQ ID NO: 1145 - RNA, 21 nt, Homo sapiens
acaggagugggggugggacau

SEQ ID NO: 1146 - RNA, 21 nt, Homo sapiens
cgucccaccccccacuccugu

SEQ ID NO: 1147 - RNA, 18 nt, Homo sapiens
aggagaaguaaaguagaa

SEQ ID NO: 1148 - RNA, 22 nt, Homo sapiens
auggccagagcucacacagagg

SEQ ID NO: 1149 - RNA, 21 nt, Homo sapiens
gcaggacaggcagaaguggau

SEQ ID NO: 1150 - RNA, 22 nt, Homo sapiens
cagggcaggaagaaguggacaa

SEQ ID NO: 1151 - RNA, 22 nt, Homo sapiens
guccacuucugccugcccugcc

SEQ ID NO: 1152 - RNA, 21 nt, Homo sapiens
ugggcucaggguacaaagguu

SEQ ID NO: 1153 - RNA, 21 nt, Homo sapiens
cacaggcuuagaaaagacagu

SEQ ID NO: 1154 - RNA, 22 nt, Homo sapiens
gugacugauaccuuggaggcau

SEQ ID NO: 1155 - RNA, 22 nt, Homo sapiens
ugucguggggcuugcuggcuug

SEQ ID NO: 1156 - RNA, 17 nt, Homo sapiens
acagggaggagauugua

SEQ ID NO: 1157 - RNA, 17 nt, Homo sapiens
gccggacaagagggagg

SEQ ID NO: 1158 - RNA, 17 nt, Homo sapiens
uuggaggcguggguuuu

SEQ ID NO: 1159 - RNA, 18 nt, Homo sapiens
cucgaguuggaagaggcg

SEQ ID NO: 1160 - RNA, 21 nt, Homo sapiens
cacggcaaaagaaacaaucca

SEQ ID NO: 1161 - RNA, 22 nt, Homo sapiens
agauuguuucuuuugccgugca

SEQ ID NO: 1162 - RNA, 22 nt, Homo sapiens
cagggcuggcagugacaugggu

SEQ ID NO: 1163 - RNA, 22 nt, Homo sapiens
auuucccugccauucccuuggc

SEQ ID NO: 1164 - RNA, 17 nt, Homo sapiens
ggugggggcuguuguuu

SEQ ID NO: 1165 - RNA, 20 nt, Homo sapiens
ggcuccuuggucuaggggua

SEQ ID NO: 1166 - RNA, 22 nt, Homo sapiens
cgucccggggcugcgcgaggca

SEQ ID NO: 1167 - RNA, 22 nt, Homo sapiens
uggggauuuggagaagugguga

SEQ ID NO: 1168 - RNA, 17 nt, Homo sapiens
ugguagagcugaggaca

SEQ ID NO: 1169 - RNA, 23 nt, Homo sapiens
uugaauucuuggccuuaagugau

SEQ ID NO: 1170 - RNA, 20 nt, Homo sapiens
gagcuuggucuguagcgguu

SEQ ID NO: 1171 - RNA, 20 nt, Homo sapiens
ggauccgagucacggcacca

SEQ ID NO: 1172 - RNA, 17 nt, Homo sapiens
aggguguguguguuuuu

SEQ ID NO: 1173 - RNA, 17 nt, Homo sapiens
ccugguggcuuccuuuu

SEQ ID NO: 1174 - RNA, 22 nt, Homo sapiens
ucacaagguauugacuggcgua

SEQ ID NO: 1175 - RNA, 19 nt, Homo sapiens
agagguagguguggaagaa

SEQ ID NO: 1176 - RNA, 22 nt, Homo sapiens
ccaggaggcggaggagguggag

SEQ ID NO: 1177 - RNA, 22 nt, Homo sapiens
auagugguugugaauuuaccuu

SEQ ID NO: 1178 - RNA, 23 nt, Homo sapiens
gauugagacuaguagggcuaggc

SEQ ID NO: 1179 - RNA, 23 nt, Homo sapiens
ugacacggaggguggcuugggaa

SEQ ID NO: 1180 - RNA, 17 nt, Homo sapiens
gagacugggguggggcc

SEQ ID NO: 1181 - RNA, 21 nt, Homo sapiens
aagguuuggauagaugcaaua

SEQ ID NO: 1182 - RNA, 22 nt, Homo sapiens
cucaaguagucugaccagggga

SEQ ID NO: 1183 - RNA, 18 nt, Homo sapiens
gggugcgggccggcgggg

SEQ ID NO: 1184 - RNA, 22 nt, Homo sapiens
uggcggcgguaguuaugggcuu

SEQ ID NO: 1185 - RNA, 18 nt, Homo sapiens
agagcagaaggaugagau

SEQ ID NO: 1186 - RNA, 22 nt, Homo sapiens
gcucccucuagggucgcucgga

SEQ ID NO: 1187 - RNA, 21 nt, Homo sapiens
uggcaaacguggaagccgaga

SEQ ID NO: 1188 - RNA, 22 nt, Homo sapiens
ggaaagcuaggaggcuguacag

SEQ ID NO: 1189 - RNA, 21 nt, Homo sapiens
gaaagacaguagauuguauag

SEQ ID NO: 1190 - RNA, 22 nt, Homo sapiens
aacuauacaaccuacuaccuca

SEQ ID NO: 1191 - RNA, 22 nt, Homo sapiens
gggaaggcaguagguuguauag

SEQ ID NO: 1192 - RNA, 22 nt, Homo sapiens
aaccacacaaccuacuaccuca

SEQ ID NO: 1193 - RNA, 22 nt, Homo sapiens
aaccauacaaccuacuaccuca

SEQ ID NO: 1194 - RNA, 22 nt, Homo sapiens
agaaaggcagcaggucguauag

SEQ ID NO: 1195 - RNA, 22 nt, Homo sapiens
aacuaugcaaccuacuaccucu

SEQ ID NO: 1196 - RNA, 22 nt, Homo sapiens
ggaaagcuaggaggccguauag

SEQ ID NO: 1197 - RNA, 22 nt, Homo sapiens
aacuauacaaccuccuaccuca

SEQ ID NO: 1198 - RNA, 22 nt, Homo sapiens
gggaaggcaauagauuguauag

SEQ ID NO: 1199 - RNA, 22 nt, Homo sapiens
ggaaagacaguagacuguauag

SEQ ID NO: 1200 - RNA, 22 nt, Homo sapiens
aacuauacaaucuacuaccuca

SEQ ID NO: 1201 - RNA, 21 nt, Homo sapiens
gcaaggcaguggccuguacag

SEQ ID NO: 1202 - RNA, 22 nt, Homo sapiens
aacuguacaaacuacuaccuca

SEQ ID NO: 1203 - RNA, 22 nt, Homo sapiens
agcaaggcaguagcuugcgcag

SEQ ID NO: 1204 - RNA, 22 nt, Homo sapiens
aacagcacaaacuacuaccuca

SEQ ID NO: 1205 - RNA, 22 nt, Homo sapiens
auacauacuucuuuacauucca

SEQ ID NO: 1206 - RNA, 22 nt, Homo sapiens
cauaccuauagauacaagcuug

SEQ ID NO: 1207 - RNA, 22 nt, Homo sapiens
cacaaguucggaucuacggguu

SEQ ID NO: 1208 - RNA, 21 nt, Homo sapiens
uucaguuaucacaguacugua

SEQ ID NO: 1209 - RNA, 22 nt, Homo sapiens
agcaucagcacugugauaacug

SEQ ID NO: 1210 - RNA, 23 nt, Homo sapiens
caaggcagcacuguaaagaagcu

SEQ ID NO: 1211 - RNA, 23 nt, Homo sapiens
ucauagcccuguacaaugcugcu

SEQ ID NO: 1212 - RNA, 23 nt, Homo sapiens
agcagcauuguacagggcuauga

SEQ ID NO: 1213 - RNA, 22 nt, Homo sapiens
uagcacaugcucaaacauccgu

SEQ ID NO: 1214 - RNA, 23 nt, Homo sapiens
accacaggagucugagcauuuga

SEQ ID NO: 1215 - RNA, 22 nt, Homo sapiens
guaagaagugcuuacauugcag

SEQ ID NO: 1216 - RNA, 23 nt, Homo sapiens
cuaccugcacuguaagcacuuuu

SEQ ID NO: 1217 - RNA, 22 nt, Homo sapiens
gcagcaaguacccacagugcgg

SEQ ID NO: 1218 - RNA, 21 nt, Homo sapiens
aucugcacugucagcacuuua

SEQ ID NO: 1219 - RNA, 23 nt, Homo sapiens
ugauagcccuguacaaugcugcu

SEQ ID NO: 1220 - RNA, 22 nt, Homo sapiens
uauuccccuagauacgaauuug

SEQ ID NO: 1221 - RNA, 23 nt, Homo sapiens
cacaaauucggaucuacagggua

SEQ ID NO: 1222 - RNA, 22 nt, Homo sapiens
auuccccuagaaucgaaucugu

SEQ ID NO: 1223 - RNA, 23 nt, Homo sapiens
cacaaauucgguucuacagggua

SEQ ID NO: 1224 - RNA, 21 nt, Homo sapiens
cuagggaagaacagugagcaa

SEQ ID NO: 1225 - RNA, 18 nt, Homo sapiens
caugcucagcugacccug

SEQ ID NO: 1226 - RNA, 21 nt, Homo sapiens
ccaaccaaugaaagaaugcuu

SEQ ID NO: 1227 - RNA, 22 nt, Homo sapiens
acacacccacgcgagccggaaa

SEQ ID NO: 1228 - RNA, 21 nt, Homo sapiens
cggcucggguggcggcgacgg

SEQ ID NO: 1229 - RNA, 23 nt, Homo sapiens
gucacaucccucccaagacccuc

SEQ ID NO: 1230 - RNA, 27 nt, Homo sapiens
ugcccacucucaccaucaccuacagug

SEQ ID NO: 1231 - RNA, 23 nt, Homo sapiens
ggaagccaucaagucgcugcagg

SEQ ID NO: 1232 - RNA, 22 nt, Homo sapiens
auaagagucucccccuguauau

SEQ ID NO: 1233 - RNA, 22 nt, Homo sapiens
augagagucucccccuguauau

SEQ ID NO: 1234 - RNA, 21 nt, Homo sapiens
aacauacaaaggguauccucu

SEQ ID NO: 1235 - RNA, 23 nt, Homo sapiens
gcacgucaccggucuaccauccc

SEQ ID NO: 1236 - RNA, 21 nt, Homo sapiens
agaaguagaccauguguccua

SEQ ID NO: 1237 - RNA, 22 nt, Homo sapiens
gaggcucagaauggcucaggag

SEQ ID NO: 1238 - RNA, 21 nt, Homo sapiens
cucccccacugcagcuggcac

SEQ ID NO: 1239 - RNA, 21 nt, Homo sapiens
gagcugcauccuggcuccggg

SEQ ID NO: 1240 - RNA, 21 nt, Homo sapiens
auaauggagaccaggccacga

SEQ ID NO: 1241 - RNA, 20 nt, Homo sapiens
cucaaagcaaacccugcaga

SEQ ID NO: 1242 - RNA, 21 nt, Homo sapiens
gcuuaaacaucuacaugaaca

SEQ ID NO: 1243 - RNA, 18 nt, Homo sapiens
gaaaugagggccagcuga

SEQ ID NO: 1244 - RNA, 21 nt, Homo sapiens
ccccucccagccucccugcca

SEQ ID NO: 1245 - RNA, 20 nt, Homo sapiens
uccgccugucugaacaguga

SEQ ID NO: 1246 - RNA, 22 nt, Homo sapiens
uauuuagugugauaauggcguu

SEQ ID NO: 1247 - RNA, 21 nt, Homo sapiens
cugaggagagaggaggugggg

SEQ ID NO: 1248 - RNA, 19 nt, Homo sapiens
ccaccucccgaguccucac

SEQ ID NO: 1249 - RNA, 22 nt, Homo sapiens
cugggggcggcacaggggcuca

SEQ ID NO: 1250 - RNA, 22 nt, Homo sapiens
ccccccacugggccguacccac

SEQ ID NO: 1251 - RNA, 22 nt, Homo sapiens
caaacaccauugucacacucca

SEQ ID NO: 1252 - RNA, 22 nt, Homo sapiens
cuagggaacacagggcugguga

SEQ ID NO: 1253 - RNA, 26 nt, Homo sapiens
ccccauccaggccugcaugcccucac

SEQ ID NO: 1254 - RNA, 20 nt, Homo sapiens
cuggggaaaaggguggcacg

SEQ ID NO: 1255 - RNA, 17 nt, Homo sapiens
ccaccgccuggccccac

SEQ ID NO: 1256 - RNA, 20 nt, Homo sapiens
ggggggcgaggcagguguga

SEQ ID NO: 1257 - RNA, 21 nt, Homo sapiens
cacacaccugcccccgcccac

SEQ ID NO: 1258 - RNA, 23 nt, Homo sapiens
cugugggagggcaguggugagag

SEQ ID NO: 1259 - RNA, 24 nt, Homo sapiens
cgcucucccccaaacccuacccac

SEQ ID NO: 1260 - RNA, 20 nt, Homo sapiens
gcagcuguccgcccagacac

SEQ ID NO: 1261 - RNA, 22 nt, Homo sapiens
ugccgugcccuggccucccacu

SEQ ID NO: 1262 - RNA, 20 nt, Homo sapiens
cugcgggaggacagggcuca

SEQ ID NO: 1263 - RNA, 22 nt, Homo sapiens
gugggguggguggucaggccga

SEQ ID NO: 1264 - RNA, 21 nt, Homo sapiens
cggcccccccccccccccccc

SEQ ID NO: 1265 - RNA, 22 nt, Homo sapiens
cuggagagacaaggggaagagg

SEQ ID NO: 1266 - RNA, 22 nt, Homo sapiens
uccccauuuccccugucacuca

SEQ ID NO: 1267 - RNA, 21 nt, Homo sapiens
cugggggacggagcagaagga

SEQ ID NO: 1268 - RNA, 21 nt, Homo sapiens
cgcgcuucggccccgcccccg

SEQ ID NO: 1269 - RNA, 20 nt, Homo sapiens
ggggcagacagacgaggaag

SEQ ID NO: 1270 - RNA, 23 nt, Homo sapiens
cacacacuggggcucccacucac

SEQ ID NO: 1271 - RNA, 22 nt, Homo sapiens
cacuccuauaauugauccaguu

SEQ ID NO: 1272 - RNA, 20 nt, Homo sapiens
ggcauucaccgcgugccuua

SEQ ID NO: 1273 - RNA, 26 nt, Homo sapiens
aaccaucucauacaaaccaacuacuu

SEQ ID NO: 1274 - RNA, 21 nt, Homo sapiens
auguaggccuuuagaucacuu

SEQ ID NO: 1275 - RNA, 22 nt, Homo sapiens
uauaggccuuuagaucaucuga

SEQ ID NO: 1276 - RNA, 21 nt, Homo sapiens
uuuaagugaucuaaaggccua

SEQ ID NO: 1277 - RNA, 22 nt, Homo sapiens
aucaagguccgcugugaacacg

SEQ ID NO: 1278 - RNA, 19 nt, Homo sapiens
ccugcuccaaaaauccauu

SEQ ID NO: 1279 - RNA, 24 nt, Homo sapiens
gcuccagucucgacguucccgggg

SEQ ID NO: 1280 - RNA, 22 nt, Homo sapiens
uccggggacgaacgggacgggu

SEQ ID NO: 1281 - RNA, 27 nt, Homo sapiens
uuuagcacagugcuuauacaagaaggu

SEQ ID NO: 1282 - RNA, 22 nt, Homo sapiens
ugaagaagggggggaagggcgu

SEQ ID NO: 1283 - RNA, 21 nt, Homo sapiens
aaaggccacauccagcaccgu

SEQ ID NO: 1284 - RNA, 21 nt, Homo sapiens
agcgccuuuggcagcuagagu

SEQ ID NO: 1285 - RNA, 22 nt, Homo sapiens
uaaaugaauucaauuuccuucu

SEQ ID NO: 1286 - RNA, 21 nt, Homo sapiens
ugcaggcugaucuucuucucu

SEQ ID NO: 1287 - RNA, 24 nt, Homo sapiens
acugcaggcuccagcuuccaggcu

SEQ ID NO: 1288 - RNA, 23 nt, Homo sapiens
aaucuacuuucuuugcucauccu

SEQ ID NO: 1289 - RNA, 22 nt, Homo sapiens
uggaugagcaaagaaagugguu

SEQ ID NO: 1290 - RNA, 22 nt, Homo sapiens
aaccacuuucuuugcucauccg

SEQ ID NO: 1291 - RNA, 22 nt, Homo sapiens
agcuagugagaagucaaugccu

SEQ ID NO: 1292 - RNA, 21 nt, Homo sapiens
ggucagaacccaucauucacu

SEQ ID NO: 1293 - RNA, 21 nt, Homo sapiens
uuccacgaccuaauccuaacu

SEQ ID NO: 1294 - RNA, 22 nt, Homo sapiens
ggcucccaagaaccucaccugu

SEQ ID NO: 1295 - RNA, 24 nt, Homo sapiens
ucacagguuaaagggucucaggga

SEQ ID NO: 1296 - RNA, 22 nt, Homo sapiens
agcucccaagagccuaacccgu

SEQ ID NO: 1297 - RNA, 22 nt, Homo sapiens
gucccaagagccugacuuguga

SEQ ID NO: 1298 - RNA, 22 nt, Homo sapiens
ucacaaguuagggucucaggga

SEQ ID NO: 1299 - RNA, 18 nt, Homo sapiens
ugguggcagaggugggau

SEQ ID NO: 1300 - RNA, 19 nt, Homo sapiens
augguggcaguggugggau

SEQ ID NO: 1301 - RNA, 19 nt, Homo sapiens
aagccaaagccuuauccau

SEQ ID NO: 1302 - RNA, 22 nt, Homo sapiens
auccuucuacaaauucacccau

SEQ ID NO: 1303 - RNA, 22 nt, Homo sapiens
acucaguaugccaggguaccau

SEQ ID NO: 1304 - RNA, 22 nt, Homo sapiens
cgcauuauuacucacgguacga

SEQ ID NO: 1305 - RNA, 23 nt, Homo sapiens
aacaggugcucaaauaagacuug

SEQ ID NO: 1306 - RNA, 22 nt, Homo sapiens
aacaacacuugaccacauccug

SEQ ID NO: 1307 - RNA, 21 nt, Homo sapiens
cgcguaccaaaaguaauaaug

SEQ ID NO: 1308 - RNA, 23 nt, Homo sapiens
agcccuguucuacagcccugagg

SEQ ID NO: 1309 - RNA, 21 nt, Homo sapiens
uggggauuacacuucaacagg

SEQ ID NO: 1310 - RNA, 18 nt, Homo sapiens
cccccaccaccacgcccg

SEQ ID NO: 1311 - RNA, 20 nt, Homo sapiens
cacccccaccaccacgcccg

SEQ ID NO: 1312 - RNA, 22 nt, Homo sapiens
ccaguagcacggcucaguccag

SEQ ID NO: 1313 - RNA, 22 nt, Homo sapiens
ccaguagcauggcucaguccag

SEQ ID NO: 1314 - RNA, 23 nt, Homo sapiens
acacagcucuuccauaucuccag

SEQ ID NO: 1315 - RNA, 22 nt, Homo sapiens
ugccuggcacauagcaggcacu

SEQ ID NO: 1316 - RNA, 22 nt, Homo sapiens
ugagugcuugcuaggugccaag

SEQ ID NO: 1317 - RNA, 26 nt, Homo sapiens
uuucagaauuugcugccaucaucauc

SEQ ID NO: 1318 - RNA, 25 nt, Homo sapiens
aagaaagagucuugcuuugucgccc

SEQ ID NO: 1319 - RNA, 22 nt, Homo sapiens
gacagggucucguuuugucgcc

SEQ ID NO: 1320 - RNA, 25 nt, Homo sapiens
acugcagccucaaccucauggguuc

SEQ ID NO: 1321 - RNA, 22 nt, Homo sapiens
uccacuuccuggguucaagcaa

SEQ ID NO: 1322 - RNA, 19 nt, Homo sapiens
cacugcaaccuccaucucc

SEQ ID NO: 1323 - RNA, 21 nt, Homo sapiens
cucaggcuggagugcaguggu

SEQ ID NO: 1324 - RNA, 22 nt, Homo sapiens
acuuacugcagccucaaccacc

SEQ ID NO: 1325 - RNA, 22 nt, Homo sapiens
agccaagcucagacggauccga

SEQ ID NO: 1326 - RNA, 17 nt, Homo sapiens
gacagccucucccccac

SEQ ID NO: 1327 - RNA, 22 nt, Homo sapiens
aucagagcccucugagcuucag

SEQ ID NO: 1328 - RNA, 20 nt, Homo sapiens
ugucuccacagggcucuuua

SEQ ID NO: 1329 - RNA, 22 nt, Homo sapiens
aaaauacauauauaucuacgua

SEQ ID NO: 1330 - RNA, 22 nt, Homo sapiens
gcucuuuucauuaauguagaca

SEQ ID NO: 1331 - RNA, 22 nt, Homo sapiens
auagaugauaugcacaguacua

SEQ ID NO: 1332 - RNA, 17 nt, Homo sapiens
agaaagaagcaauauga

SEQ ID NO: 1333 - RNA, 21 nt, Homo sapiens
aaagagaccgguucacuguga

SEQ ID NO: 1334 - RNA, 17 nt, Homo sapiens
gggagaggaggaggcga

SEQ ID NO: 1335 - RNA, 20 nt, Homo sapiens
aagcagaaaaaggcaaacga

SEQ ID NO: 1336 - RNA, 22 nt, Homo sapiens
agaaagcgcuuuccuuuguaga

SEQ ID NO: 1337 - RNA, 22 nt, Homo sapiens
gaaaagccagggucuguauaga

SEQ ID NO: 1338 - RNA, 22 nt, Homo sapiens
aggucucacuuuguugcccaga

SEQ ID NO: 1339 - RNA, 21 nt, Homo sapiens
ccugggcaacaaagugagauc

SEQ ID NO: 1340 - RNA, 21 nt, Homo sapiens
agggcucaucuugguccugca

SEQ ID NO: 1341 - RNA, 22 nt, Homo sapiens
gacucgaaccacugauccagca

SEQ ID NO: 1342 - RNA, 21 nt, Homo sapiens
ucuccagaucagggcagucca

SEQ ID NO: 1343 - RNA, 23 nt, Homo sapiens
aaaaugcagauuccuggacucca

SEQ ID NO: 1344 - RNA, 19 nt, Homo sapiens
ucccugauccaaaaaucca

SEQ ID NO: 1345 - RNA, 24 nt, Homo sapiens
acugcuggucuucagucagggcca

SEQ ID NO: 1346 - RNA, 22 nt, Homo sapiens
auacuuuuugggguaagggcuu

SEQ ID NO: 1347 - RNA, 20 nt, Homo sapiens
gaacgggagccggggcgcga

SEQ ID NO: 1348 - RNA, 22 nt, Homo sapiens
augcuuuuugggguaagggcuu

SEQ ID NO: 1349 - RNA, 25 nt, Homo sapiens
cagcgucugccggaacccguuccca

SEQ ID NO: 1350 - RNA, 22 nt, Homo sapiens
gcacaaaucuccagaccaccca

SEQ ID NO: 1351 - RNA, 22 nt, Homo sapiens
agacaacaaugccaaccucaca

SEQ ID NO: 1352 - RNA, 21 nt, Homo sapiens
ucacccagaucugcggccuaa

SEQ ID NO: 1353 - RNA, 22 nt, Homo sapiens
uugcccagauccguggccuauu

SEQ ID NO: 1354 - RNA, 21 nt, Homo sapiens
auuaggccgcagaucugggug

SEQ ID NO: 1355 - RNA, 21 nt, Homo sapiens
gcaagcccagaccgcaaaaag

SEQ ID NO: 1356 - RNA, 22 nt, Homo sapiens
ggagauggagccagggcccuaa

SEQ ID NO: 1357 - RNA, 17 nt, Homo sapiens
caccugaauuacuugaa

SEQ ID NO: 1358 - RNA, 22 nt, Homo sapiens
uacaucuggacagccgaaugaa

SEQ ID NO: 1359 - RNA, 22 nt, Homo sapiens
ucccucacacagaauuccagaa

SEQ ID NO: 1360 - RNA, 24 nt, Homo sapiens
gaagucacucccaggcagcugcaa

SEQ ID NO: 1361 - RNA, 21 nt, Homo sapiens
uuuagcauaaguaugucccaa

SEQ ID NO: 1362 - RNA, 22 nt, Homo sapiens
agagcaagaccccgucucuaaa

SEQ ID NO: 1363 - RNA, 22 nt, Homo sapiens
gggguucgaggcuacagugaga

SEQ ID NO: 1364 - RNA, 22 nt, Homo sapiens
cacaucucacuguagccucaaa

SEQ ID NO: 1365 - RNA, 22 nt, Homo sapiens
ucucucccauuagaguugaaaa

SEQ ID NO: 1366 - RNA, 18 nt, Homo sapiens
caccaccagagccaacgu

SEQ ID NO: 1367 - RNA, 22 nt, Homo sapiens
uggacguuugcaggggaggugg

SEQ ID NO: 1368 - RNA, 22 nt, Homo sapiens
cacgaccgacgccacgccgagu

SEQ ID NO: 1369 - RNA, 21 nt, Homo sapiens
agccggucgagguccggucga

SEQ ID NO: 1370 - RNA, 22 nt, Homo sapiens
augcccuuuuaacauugcacug

SEQ ID NO: 1371 - RNA, 22 nt, Homo sapiens
gcagacaguagcacaaugugaa

SEQ ID NO: 1372 - RNA, 22 nt, Homo sapiens
augcccuuucaucauugcacug

SEQ ID NO: 1373 - RNA, 21 nt, Homo sapiens
guagugcaacagggaaagagu

SEQ ID NO: 1374 - RNA, 18 nt, Homo sapiens
aucacauucaccucccug

SEQ ID NO: 1375 - RNA, 19 nt, Homo sapiens
cagcaucagcagcaucauc

SEQ ID NO: 1376 - RNA, 22 nt, Homo sapiens
agaaaaugccccucaguuuuga

SEQ ID NO: 1377 - RNA, 22 nt, Homo sapiens
cgaccauggcuguagacuguua

SEQ ID NO: 1378 - RNA, 24 nt, Homo sapiens
gaaagugcauagaauucugucugg

SEQ ID NO: 1379 - RNA, 22 nt, Homo sapiens
aguaacaaucgaaagccacggu

SEQ ID NO: 1380 - RNA, 22 nt, Homo sapiens
cagcugguugaaggggaccaaa

SEQ ID NO: 1381 - RNA, 22 nt, Homo sapiens
uagcugguugaaggggaccaaa

SEQ ID NO: 1382 - RNA, 22 nt, Homo sapiens
ccccucuggucaaccagucaca

SEQ ID NO: 1383 - RNA, 22 nt, Homo sapiens
gcgagagugcgggccccaggag

SEQ ID NO: 1384 - RNA, 22 nt, Homo sapiens
cgccacggcuccaaucccuaua

SEQ ID NO: 1385 - RNA, 23 nt, Homo sapiens
ucacauaggaauaaaaagccaua

SEQ ID NO: 1386 - RNA, 22 nt, Homo sapiens
cccauggcuuuuagcccuacau

SEQ ID NO: 1387 - RNA, 23 nt, Homo sapiens
ucacauaggaaugaaaagccaua

SEQ ID NO: 1388 - RNA, 22 nt, Homo sapiens
agacucauuugagacgaugaug

SEQ ID NO: 1389 - RNA, 23 nt, Homo sapiens
uccaucaucaaaacaaauggagu

SEQ ID NO: 1390 - RNA, 23 nt, Homo sapiens
cuacgcguauucuuaagcaauaa

SEQ ID NO: 1391 - RNA, 22 nt, Homo sapiens
ggcccugguguugugaaguagc

SEQ ID NO: 1392 - RNA, 22 nt, Homo sapiens
aacccuggugucgugaaauagc

SEQ ID NO: 1393 - RNA, 23 nt, Homo sapiens
cggccugauucacaacaccagcu

SEQ ID NO: 1394 - RNA, 23 nt, Homo sapiens
acuccaacagggccgcgucucca

SEQ ID NO: 1395 - RNA, 23 nt, Homo sapiens
acuggagacacgugcacuguaga

SEQ ID NO: 1396 - RNA, 21 nt, Homo sapiens
ccgugguucuacccuguggua

SEQ ID NO: 1397 - RNA, 22 nt, Homo sapiens
cuaccauaggguaaaaccacug

SEQ ID NO: 1398 - RNA, 22 nt, Homo sapiens
ccaucuuuaccagacaguguua

SEQ ID NO: 1399 - RNA, 22 nt, Homo sapiens
uccaacacuguacuggaagaug

SEQ ID NO: 1400 - RNA, 23 nt, Homo sapiens
uccauaaaguaggaaacacuaca

SEQ ID NO: 1401 - RNA, 21 nt, Homo sapiens
aguagugcuuucuacuuuaug

SEQ ID NO: 1402 - RNA, 21 nt, Homo sapiens
gagcuacagugcuucaucuca

SEQ ID NO: 1403 - RNA, 22 nt, Homo sapiens
accagagaugcagcacugcacc

SEQ ID NO: 1404 - RNA, 20 nt, Homo sapiens
aguacaucaucuauacugua

SEQ ID NO: 1405 - RNA, 22 nt, Homo sapiens
cuuacaguauaugaugauaucc

SEQ ID NO: 1406 - RNA, 22 nt, Homo sapiens
agaacaguauuuccaggaaucc

SEQ ID NO: 1407 - RNA, 23 nt, Homo sapiens
agggauuccugggaaaacuggac

SEQ ID NO: 1408 - RNA, 21 nt, Homo sapiens
cagcgaaacaggcaaacggag

SEQ ID NO: 1409 - RNA, 22 nt, Homo sapiens
ggagcccgcgccccgcgccgag

SEQ ID NO: 1410 - RNA, 22 nt, Homo sapiens
cugaagaacugaauuucagagg

SEQ ID NO: 1411 - RNA, 22 nt, Homo sapiens
aacccauggaauucaguucuca

SEQ ID NO: 1412 - RNA, 22 nt, Homo sapiens
ccagaacugaguccacagggca

SEQ ID NO: 1413 - RNA, 22 nt, Homo sapiens
agccuauggaauucaguucuca

SEQ ID NO: 1414 - RNA, 21 nt, Homo sapiens
cggggugcacgggcggagggc

SEQ ID NO: 1415 - RNA, 22 nt, Homo sapiens
acaccuggcuccacacgcgggc

SEQ ID NO: 1416 - RNA, 20 nt, Homo sapiens
gcagaagcauuuccacacac

SEQ ID NO: 1417 - RNA, 22 nt, Homo sapiens
uagcagaagcauuuccgcacac

SEQ ID NO: 1418 - RNA, 22 nt, Homo sapiens
acaaaguucuguagugcacuga

SEQ ID NO: 1419 - RNA, 22 nt, Homo sapiens
agucggagugucucagaacuuu

SEQ ID NO: 1420 - RNA, 22 nt, Homo sapiens
acaaaguucugugaugcacuga

SEQ ID NO: 1421 - RNA, 22 nt, Homo sapiens
gccugaguguauaacagaacuu

SEQ ID NO: 1422 - RNA, 21 nt, Homo sapiens
gcacagcccccgucccucccu

SEQ ID NO: 1423 - RNA, 23 nt, Homo sapiens
gggagugaagacacggagccaga

SEQ ID NO: 1424 - RNA, 22 nt, Homo sapiens
cugucccccaggccuguaccag

SEQ ID NO: 1425 - RNA, 22 nt, Homo sapiens
cacugguacaaggguugggaga

SEQ ID NO: 1426 - RNA, 21 nt, Homo sapiens
ccucaaggagcuucagucuag

SEQ ID NO: 1427 - RNA, 21 nt, Homo sapiens
acuagacugugagcuccucga

SEQ ID NO: 1428 - RNA, 18 nt, Homo sapiens
agacugugagcuccucga

SEQ ID NO: 1429 - RNA, 21 nt, Homo sapiens
ccaaguucugucaugcacuga

SEQ ID NO: 1430 - RNA, 22 nt, Homo sapiens
gaucacuuuugugacuaugcaa

SEQ ID NO: 1431 - RNA, 22 nt, Homo sapiens
acaacuguaacuagacgguuuu

SEQ ID NO: 1432 - RNA, 23 nt, Homo sapiens
aggaacagcagcagcccgggccg

SEQ ID NO: 1433 - RNA, 21 nt, Homo sapiens
gggcaucugggacgcgcagga

SEQ ID NO: 1434 - RNA, 22 nt, Homo sapiens
aauaggucaaccguguaugauu

SEQ ID NO: 1435 - RNA, 22 nt, Homo sapiens
cgaaggcaacacggauaaccua

SEQ ID NO: 1436 - RNA, 22 nt, Homo sapiens
uguuaaugcuaauauguaggag

SEQ ID NO: 1437 - RNA, 23 nt, Homo sapiens
accccuaucacgauuagcauuaa

SEQ ID NO: 1438 - RNA, 20 nt, Homo sapiens
cccaacccagcccagcccaa

SEQ ID NO: 1439 - RNA, 22 nt, Homo sapiens
ugaggcagcacaauauggccug

SEQ ID NO: 1440 - RNA, 22 nt, Homo sapiens
cacaaaccauuaugugcugcua

SEQ ID NO: 1441 - RNA, 22 nt, Homo sapiens
uagagcagcaaauaaugauucg

SEQ ID NO: 1442 - RNA, 22 nt, Homo sapiens
uguaaaccaugaugugcugcua

SEQ ID NO: 1443 - RNA, 22 nt, Homo sapiens
ucagcagcacaguuaauacugg

SEQ ID NO: 1444 - RNA, 22 nt, Homo sapiens
uaaagcagcacaguaauauugg

SEQ ID NO: 1445 - RNA, 22 nt, Homo sapiens
cgccaauauuuacgugcugcua

SEQ ID NO: 1446 - RNA, 22 nt, Homo sapiens
cuacaagugccuucacugcagu

SEQ ID NO: 1447 - RNA, 23 nt, Homo sapiens
cuaccugcacuguaagcacuuug

SEQ ID NO: 1448 - RNA, 22 nt, Homo sapiens
gguacagucaacggucaguggu

SEQ ID NO: 1449 - RNA, 22 nt, Homo sapiens
gguacaaucaacggucgauggu

SEQ ID NO: 1450 - RNA, 23 nt, Homo sapiens
acucaccgacagcguugaauguu

SEQ ID NO: 1451 - RNA, 21 nt, Homo sapiens
uugcauucauuguucagugag

SEQ ID NO: 1452 - RNA, 23 nt, Homo sapiens
acccaccgacagcaaugaauguu

SEQ ID NO: 1453 - RNA, 22 nt, Homo sapiens
guccacucaacggucgaugguu

SEQ ID NO: 1454 - RNA, 22 nt, Homo sapiens
acucaccgacagguugaauguu

SEQ ID NO: 1455 - RNA, 23 nt, Homo sapiens
acccaccgacaacaaugaauguu

SEQ ID NO: 1456 - RNA, 21 nt, Homo sapiens
uaguuggcaagucuagaacca

SEQ ID NO: 1457 - RNA, 18 nt, Homo sapiens
ggagaggagggcacugga

SEQ ID NO: 1458 - RNA, 24 nt, Homo sapiens
agugugaguucuaccauugccaaa

SEQ ID NO: 1459 - RNA, 18 nt, Homo sapiens
auucaaucuacugccuca

SEQ ID NO: 1460 - RNA, 22 nt, Homo sapiens
uuauggcccuucgguaauucac

SEQ ID NO: 1461 - RNA, 22 nt, Homo sapiens
agugaauucuaccagugccaua

SEQ ID NO: 1462 - RNA, 22 nt, Homo sapiens
acccuuaucaguucuccgucca

SEQ ID NO: 1463 - RNA, 22 nt, Homo sapiens
gaccagaggaaagccagccccu

SEQ ID NO: 1464 - RNA, 22 nt, Homo sapiens
ucaggaacugccuuucucucca

SEQ ID NO: 1465 - RNA, 22 nt, Homo sapiens
cccaaaaaauucaccuuugggc

SEQ ID NO: 1466 - RNA, 22 nt, Homo sapiens
agcccaaaaggagaauucuuug

SEQ ID NO: 1467 - RNA, 22 nt, Homo sapiens
ccggcugcaacacaagacacga

SEQ ID NO: 1468 - RNA, 22 nt, Homo sapiens
gcccggguccuguguuguagcc

SEQ ID NO: 1469 - RNA, 21 nt, Homo sapiens
ugcaaacccugcaugugggag

SEQ ID NO: 1470 - RNA, 21 nt, Homo sapiens
cccuccaccaugcaagggaug

SEQ ID NO: 1471 - RNA, 23 nt, Homo sapiens
ccagaaggagcacuuagggcagu

SEQ ID NO: 1472 - RNA, 23 nt, Homo sapiens
cuaucugcacuagaugcaccuua

SEQ ID NO: 1473 - RNA, 22 nt, Homo sapiens
gccagaaggggcauuuagggca

SEQ ID NO: 1474 - RNA, 23 nt, Homo sapiens
cuaacugcacuagaugcaccuua

SEQ ID NO: 1475 - RNA, 21 nt, Homo sapiens
gaccaaucgccguccccgccg

SEQ ID NO: 1476 - RNA, 22 nt, Homo sapiens
cggugagcacccggccccugcg

SEQ ID NO: 1477 - RNA, 21 nt, Homo sapiens
cagggcaggcaccggcacuca

SEQ ID NO: 1478 - RNA, 22 nt, Homo sapiens
accuaauauaucaaacauauca

SEQ ID NO: 1479 - RNA, 21 nt, Homo sapiens
aacccaauaucaaacauauca

SEQ ID NO: 1480 - RNA, 21 nt, Homo sapiens
aggcggcaggcacaggacugg

SEQ ID NO: 1481 - RNA, 20 nt, Homo sapiens
ggagaccacaaugccuggug

SEQ ID NO: 1482 - RNA, 23 nt, Homo sapiens
cccaacagacauggcgguacuca

SEQ ID NO: 1483 - RNA, 22 nt, Homo sapiens
uucacacugcaugcucugggua

SEQ ID NO: 1484 - RNA, 22 nt, Homo sapiens
uggcagcagcggagggggcaga

SEQ ID NO: 1485 - RNA, 22 nt, Homo sapiens
ggggacgaaauccaagcgcagc

SEQ ID NO: 1486 - RNA, 22 nt, Homo sapiens
ccucccagugcgggaccccucc

SEQ ID NO: 1487 - RNA, 22 nt, Homo sapiens
cagaagugggccgggcacaggg

SEQ ID NO: 1488 - RNA, 20 nt, Homo sapiens
cccgccgcgucgcccugggg

SEQ ID NO: 1489 - RNA, 22 nt, Homo sapiens
ggcccgggcagcaaggcaaggu

SEQ ID NO: 1490 - RNA, 23 nt, Homo sapiens
cagcugcuuuugggauuccguug

SEQ ID NO: 1491 - RNA, 22 nt, Homo sapiens
cugugaccuauggaauuggcag

SEQ ID NO: 1492 - RNA, 21 nt, Homo sapiens
ggcugucaauucauaggucag

SEQ ID NO: 1493 - RNA, 22 nt, Homo sapiens
acugggacuuuguaggccaguu

SEQ ID NO: 1494 - RNA, 22 nt, Homo sapiens
ucaucucgcccgcaaagaccca

SEQ ID NO: 1495 - RNA, 22 nt, Homo sapiens
agcgggacuuugagggccaguu

SEQ ID NO: 1496 - RNA, 22 nt, Homo sapiens
ucaucucgcccucaaaaccccg

SEQ ID NO: 1497 - RNA, 22 nt, Homo sapiens
cagauaacagcagccccacugg

SEQ ID NO: 1498 - RNA, 22 nt, Homo sapiens
uccacauggaguugcuguuaca

SEQ ID NO: 1499 - RNA, 22 nt, Homo sapiens
ggagcagcacagccaauauugg

SEQ ID NO: 1500 - RNA, 21 nt, Homo sapiens
gccaauauuucugugcugcua

SEQ ID NO: 1501 - RNA, 22 nt, Homo sapiens
cucaggcaguuucuuguugccg

SEQ ID NO: 1502 - RNA, 22 nt, Homo sapiens
cccaacaacaugaaacuaccua

SEQ ID NO: 1503 - RNA, 22 nt, Homo sapiens
gaaggcagugucgugcugucga

SEQ ID NO: 1504 - RNA, 22 nt, Homo sapiens
cccaacaacaggaaacuaccua

SEQ ID NO: 1505 - RNA, 22 nt, Homo sapiens
ugagccacugugccuggccuga

SEQ ID NO: 1506 - RNA, 19 nt, Homo sapiens
uaugcuaccuuugcacggu

SEQ ID NO: 1507 - RNA, 22 nt, Homo sapiens
gcuggguggagaagguggugaa

SEQ ID NO: 1508 - RNA, 23 nt, Homo sapiens
ccucccacugcccucucuacccg

SEQ ID NO: 1509 - RNA, 20 nt, Homo sapiens
acagcaaggagggcaggagg

SEQ ID NO: 1510 - RNA, 22 nt, Homo sapiens
gaaccuaucuccccucuggacc

SEQ ID NO: 1511 - RNA, 22 nt, Homo sapiens
uaaccaaugugcagacuacugu

SEQ ID NO: 1512 - RNA, 23 nt, Homo sapiens
gaacagguagucugaacacuggg

SEQ ID NO: 1513 - RNA, 22 nt, Homo sapiens
uaaccaaugugcagacuacugu

SEQ ID NO: 1514 - RNA, 23 nt, Homo sapiens
gaacagauagucuaaacacuggg

SEQ ID NO: 1515 - RNA, 23 nt, Homo sapiens
ucaguuuugcauagauuugcaca

SEQ ID NO: 1516 - RNA, 22 nt, Homo sapiens
uguagugcaacuaugcaaaacu

SEQ ID NO: 1517 - RNA, 23 nt, Homo sapiens
gcuggaugcaaaccugcaaaacu

SEQ ID NO: 1518 - RNA, 22 nt, Homo sapiens
ugaaaugcaaaccugcaaaacu

SEQ ID NO: 1519 - RNA, 23 nt, Homo sapiens
ucaguuuugcauggauuugcaca

SEQ ID NO: 1520 - RNA, 22 nt, Homo sapiens
acaucguuaccagacaguguua

SEQ ID NO: 1521 - RNA, 22 nt, Homo sapiens
uccagcacuguccgguaagaug

SEQ ID NO: 1522 - RNA, 22 nt, Homo sapiens
ucaucauuaccaggcaguauua

SEQ ID NO: 1523 - RNA, 22 nt, Homo sapiens
uccaaugcugcccaguaagaug

SEQ ID NO: 1524 - RNA, 23 nt, Homo sapiens
uccaucauuacccggcaguauua

SEQ ID NO: 1525 - RNA, 22 nt, Homo sapiens
ccaaacacugcuggguaagacg

SEQ ID NO: 1526 - RNA, 20 nt, Homo sapiens
uucccaugcccuauaccucu

SEQ ID NO: 1527 - RNA, 22 nt, Homo sapiens
caaagaaguauaugcauaggaa

SEQ ID NO: 1528 - RNA, 22 nt, Homo sapiens
cuagugguccuaaacauuucac

SEQ ID NO: 1529 - RNA, 23 nt, Homo sapiens
uccagugguucuuaacaguucaa

SEQ ID NO: 1530 - RNA, 22 nt, Homo sapiens
ugugaaauguuuaggaccacua

SEQ ID NO: 1531 - RNA, 21 nt, Homo sapiens
acgucccuuugccuucccagc

SEQ ID NO: 1532 - RNA, 22 nt, Homo sapiens
aggcauaggaugacaaagggaa

SEQ ID NO: 1533 - RNA, 20 nt, Homo sapiens
acauuacuguuaucaaaaca

SEQ ID NO: 1534 - RNA, 23 nt, Homo sapiens
guaaauagagguuuaauuaacac

SEQ ID NO: 1535 - RNA, 21 nt, Homo sapiens
gaacuucacuccacugaaauc

SEQ ID NO: 1536 - RNA, 23 nt, Homo sapiens
aauaaauuaaauuuauauuacag

SEQ ID NO: 1537 - RNA, 22 nt, Homo sapiens
cagacuccgguggaaugaagga

SEQ ID NO: 1538 - RNA, 22 nt, Homo sapiens
ccacacacuuccuuacauucca

SEQ ID NO: 1539 - RNA, 22 nt, Homo sapiens
acaagcuuuuugcucgucuuau

SEQ ID NO: 1540 - RNA, 22 nt, Homo sapiens
acaaaccuuuuguucgucuuau

SEQ ID NO: 1541 - RNA, 22 nt, Homo sapiens
cuuuaagugcucauaaugcagu

SEQ ID NO: 1542 - RNA, 23 nt, Homo sapiens
cuaccugcacuauaagcacuuua

SEQ ID NO: 1543 - RNA, 22 nt, Homo sapiens
cuggaagugcccauacuacagu

SEQ ID NO: 1544 - RNA, 23 nt, Homo sapiens
cuaccugcacuaugagcacuuug

SEQ ID NO: 1545 - RNA, 22 nt, Homo sapiens
ucagccgcugucacacgcacag

SEQ ID NO: 1546 - RNA, 22 nt, Homo sapiens
cacucagcggccguuuccccaa

SEQ ID NO: 1547 - RNA, 21 nt, Homo sapiens
gugacagagccaagcacaaau

SEQ ID NO: 1548 - RNA, 21 nt, Homo sapiens
gcaccccuuugcugucccugc

SEQ ID NO: 1549 - RNA, 21 nt, Homo sapiens
aagucccuugcuugaggcucg

SEQ ID NO: 1550 - RNA, 22 nt, Homo sapiens
gaccgcuucaaggaagggacua

SEQ ID NO: 1551 - RNA, 22 nt, Homo sapiens
cuagccuccaugaauucugaug

SEQ ID NO: 1552 - RNA, 22 nt, Homo sapiens
uccaucaggagucauggaagcu

SEQ ID NO: 1553 - RNA, 22 nt, Homo sapiens
aggcgaaggaugacaaagggaa

SEQ ID NO: 1554 - RNA, 21 nt, Homo sapiens
gggaguucuuggcaugggagg

SEQ ID NO: 1555 - RNA, 21 nt, Homo sapiens
agaccuccuaugcuaagaacc

SEQ ID NO: 1556 - RNA, 21 nt, Homo sapiens
cuguccuuggcaaagagaaca

SEQ ID NO: 1557 - RNA, 21 nt, Homo sapiens
ggccgugacuggagacuguua

SEQ ID NO: 1558 - RNA, 23 nt, Homo sapiens
aguaagcagucuagagccaaggu

SEQ ID NO: 1559 - RNA, 21 nt, Homo sapiens
acagcccaucgacugguguug

SEQ ID NO: 1560 - RNA, 22 nt, Homo sapiens
acugccugucugugccugcugu

SEQ ID NO: 1561 - RNA, 22 nt, Homo sapiens
gcacagcaaguguagacaggca

SEQ ID NO: 1562 - RNA, 21 nt, Homo sapiens
gucugucaauucauaggucau

SEQ ID NO: 1563 - RNA, 22 nt, Homo sapiens
ucaacaucagucugauaagcua

SEQ ID NO: 1564 - RNA, 22 nt, Homo sapiens
auaaucccagagaccacuguga

SEQ ID NO: 1565 - RNA, 22 nt, Homo sapiens
ucacaguugccagcugagauua

SEQ ID NO: 1566 - RNA, 22 nt, Homo sapiens
ucacauuugccugcagagauuu

SEQ ID NO: 1567 - RNA, 23 nt, Homo sapiens
uccaaucaguuccugaugcagua

SEQ ID NO: 1568 - RNA, 22 nt, Homo sapiens
ccauggugcuugacggaaccau

SEQ ID NO: 1569 - RNA, 22 nt, Homo sapiens
cgcggugcuugacagaaccaug

SEQ ID NO: 1570 - RNA, 21 nt, Homo sapiens
acaugguuagaucaagcacaa

SEQ ID NO: 1571 - RNA, 22 nt, Homo sapiens
cgggacguccagacucaacucu

SEQ ID NO: 1572 - RNA, 22 nt, Homo sapiens
acagauguccagccacaauucu

SEQ ID NO: 1573 - RNA, 21 nt, Homo sapiens
agaauugcguuuggacaauca

SEQ ID NO: 1574 - RNA, 23 nt, Homo sapiens
gaaacccagcagacaauguagcu

SEQ ID NO: 1575 - RNA, 22 nt, Homo sapiens
aaaucuacauuguaugccaggu

SEQ ID NO: 1576 - RNA, 21 nt, Homo sapiens
acccaguagccagauguagcu

SEQ ID NO: 1577 - RNA, 22 nt, Homo sapiens
aggaucuacacuggcuacugag

SEQ ID NO: 1578 - RNA, 22 nt, Homo sapiens
ugggguauuugacaaacugaca

SEQ ID NO: 1579 - RNA, 22 nt, Homo sapiens
aacucagcuugucaaauacacg

SEQ ID NO: 1580 - RNA, 22 nt, Homo sapiens
acaguucuucaacuggcagcuu

SEQ ID NO: 1581 - RNA, 23 nt, Homo sapiens
uguagucacuagggcaccauuuu

SEQ ID NO: 1582 - RNA, 21 nt, Homo sapiens
aacggaaccacuagugacuug

SEQ ID NO: 1583 - RNA, 22 nt, Homo sapiens
uaaagcuugccacugaagaacu

SEQ ID NO: 1584 - RNA, 22 nt, Homo sapiens
ccucgccucugacacuugcaga

SEQ ID NO: 1585 - RNA, 21 nt, Homo sapiens
gagccaggcagggcgcuguca

SEQ ID NO: 1586 - RNA, 24 nt, Homo sapiens
gacuggcagcgcucagcccgcgcu

SEQ ID NO: 1587 - RNA, 22 nt, Homo sapiens
ccaggcaacacacacugcucuc

SEQ ID NO: 1588 - RNA, 22 nt, Homo sapiens
aucuccaaacagcaaggacaau

SEQ ID NO: 1589 - RNA, 21 nt, Homo sapiens
uuguccauuguaucuggggau

SEQ ID NO: 1590 - RNA, 20 nt, Homo sapiens
caccucucacccccauccua

SEQ ID NO: 1591 - RNA, 21 nt, Homo sapiens
ggaaaucccuggcaaugugau

SEQ ID NO: 1592 - RNA, 22 nt, Homo sapiens
aaaucccauccccaggaacccc

SEQ ID NO: 1593 - RNA, 21 nt, Homo sapiens
gguaaucccuggcaaugugau

SEQ ID NO: 1594 - RNA, 22 nt, Homo sapiens
aaaucagcaugccaggaaccca

SEQ ID NO: 1595 - RNA, 22 nt, Homo sapiens
ggguaaucacuggcaaugugau

SEQ ID NO: 1596 - RNA, 22 nt, Homo sapiens
acugauaucagcucaguaggca

SEQ ID NO: 1597 - RNA, 22 nt, Homo sapiens
cuguguuucagcucaguaggca

SEQ ID NO: 1598 - RNA, 22 nt, Homo sapiens
cuguuccugcugaacugagcca

SEQ ID NO: 1599 - RNA, 22 nt, Homo sapiens
ccugagccucucugccucugcu

SEQ ID NO: 1600 - RNA, 23 nt, Homo sapiens
gagccaaggcuaacagagccuca

SEQ ID NO: 1601 - RNA, 22 nt, Homo sapiens
ucagaccgagacaagugcaaug

SEQ ID NO: 1602 - RNA, 21 nt, Homo sapiens
caauugcccaagucuccgccu

SEQ ID NO: 1603 - RNA, 22 nt, Homo sapiens
gugcuuuaccaacuccaugaua

SEQ ID NO: 1604 - RNA, 22 nt, Homo sapiens
agucuccuggaggugguaaaac

SEQ ID NO: 1605 - RNA, 22 nt, Homo sapiens
ggaagacagcgcugaagaggcg

SEQ ID NO: 1606 - RNA, 23 nt, Homo sapiens
gacgucugaacagucacugccug

SEQ ID NO: 1607 - RNA, 22 nt, Homo sapiens
cgugcaaguaaccaagaauagg

SEQ ID NO: 1608 - RNA, 22 nt, Homo sapiens
gaaacaaguaaucaagaauagg

SEQ ID NO: 1609 - RNA, 22 nt, Homo sapiens
agccuauccuggauuacuugaa

SEQ ID NO: 1610 - RNA, 22 nt, Homo sapiens
gagccaaguaauggagaacagg

SEQ ID NO: 1611 - RNA, 21 nt, Homo sapiens
accuauccugaauuacuugaa

SEQ ID NO: 1612 - RNA, 21 nt, Homo sapiens
gcggaacuuagccacugugaa

SEQ ID NO: 1613 - RNA, 22 nt, Homo sapiens
ugcucacaagcagcuaagcccu

SEQ ID NO: 1614 - RNA, 21 nt, Homo sapiens
gcagaacuuagccacugugaa

SEQ ID NO: 1615 - RNA, 22 nt, Homo sapiens
guucaccaaucagcuaagcucu

SEQ ID NO: 1616 - RNA, 22 nt, Homo sapiens
uccaggagcucacaaucuagug

SEQ ID NO: 1617 - RNA, 22 nt, Homo sapiens
cucaauagacugugagcuccuu

SEQ ID NO: 1618 - RNA, 19 nt, Homo sapiens
ccgcccaccgccaggcccc

SEQ ID NO: 1619 - RNA, 21 nt, Homo sapiens
ccaagagauguuggcccuaac

SEQ ID NO: 1620 - RNA, 22 nt, Homo sapiens
ggagagccuccacccaacccuc

SEQ ID NO: 1621 - RNA, 23 nt, Homo sapiens
acugauuguccaaacgcaauucu

SEQ ID NO: 1622 - RNA, 22 nt, Homo sapiens
cgagaauuguggcuggacaucu

SEQ ID NO: 1623 - RNA, 21 nt, Homo sapiens
acaggauugagggggggcccu

SEQ ID NO: 1624 - RNA, 21 nt, Homo sapiens
caugcacaugcacacauacau

SEQ ID NO: 1625 - RNA, 24 nt, Homo sapiens
ugggagaaccucccugcuucugcu

SEQ ID NO: 1626 - RNA, 22 nt, Homo sapiens
aagcgguuuaccaucccacaua

SEQ ID NO: 1627 - RNA, 22 nt, Homo sapiens
auguaugugggacgguaaacca

SEQ ID NO: 1628 - RNA, 22 nt, Homo sapiens
uaaccgauuucagauggugcua

SEQ ID NO: 1629 - RNA, 22 nt, Homo sapiens
cugaacaccaaaagaaaucagu

SEQ ID NO: 1630 - RNA, 24 nt, Homo sapiens
ucuaaaccaccauaugaaaccagc

SEQ ID NO: 1631 - RNA, 22 nt, Homo sapiens
cuaagccaccaugugaaaccag

SEQ ID NO: 1632 - RNA, 23 nt, Homo sapiens
aacacugauuucaaauggugcua

SEQ ID NO: 1633 - RNA, 22 nt, Homo sapiens
uaaccgauuucaaauggugcua

SEQ ID NO: 1634 - RNA, 22 nt, Homo sapiens
gaacaccaggagaaaucgguca

SEQ ID NO: 1635 - RNA, 22 nt, Homo sapiens
agagagagucugcccuuguaua

SEQ ID NO: 1636 - RNA, 23 nt, Homo sapiens
gcuuugacaauacuauugcacug

SEQ ID NO: 1637 - RNA, 22 nt, Homo sapiens
aguagugcaauaaagucagagc

SEQ ID NO: 1638 - RNA, 23 nt, Homo sapiens
gcuuugacaauaucauugcacug

SEQ ID NO: 1639 - RNA, 23 nt, Homo sapiens
ucaccaaaacauggaagcacuua

SEQ ID NO: 1640 - RNA, 23 nt, Homo sapiens
agcaaguacauccacguuuaagu

SEQ ID NO: 1641 - RNA, 23 nt, Homo sapiens
cuacuaaaacauggaagcacuua

SEQ ID NO: 1642 - RNA, 22 nt, Homo sapiens
gaaagcacuuccauguuaaagu

SEQ ID NO: 1643 - RNA, 23 nt, Homo sapiens
ccacugaaacauggaagcacuua

SEQ ID NO: 1644 - RNA, 22 nt, Homo sapiens
cagcagguacccccauguuaaa

SEQ ID NO: 1645 - RNA, 23 nt, Homo sapiens
acacucaaacauggaagcacuua

SEQ ID NO: 1646 - RNA, 22 nt, Homo sapiens
gcaagugccuccauguuaaagu

SEQ ID NO: 1647 - RNA, 17 nt, Homo sapiens
aagcauggaagcacuua

SEQ ID NO: 1648 - RNA, 17 nt, Homo sapiens
aaacauggaagcaauua

SEQ ID NO: 1649 - RNA, 23 nt, Homo sapiens
uguaagguguugcaguguggcaa

SEQ ID NO: 1650 - RNA, 21 nt, Homo sapiens
uugcacaccacaacagccaga

SEQ ID NO: 1651 - RNA, 23 nt, Homo sapiens
cuccaacaauauccuggugcuga

SEQ ID NO: 1652 - RNA, 23 nt, Homo sapiens
uccagcaucagugauuuuguuga

SEQ ID NO: 1653 - RNA, 22 nt, Homo sapiens
cggugccuacugagcugauauc

SEQ ID NO: 1654 - RNA, 21 nt, Homo sapiens
cuggcucaguucagcaggaac

SEQ ID NO: 1655 - RNA, 22 nt, Homo sapiens
gcugcaaacauccgacugaaag

SEQ ID NO: 1656 - RNA, 22 nt, Homo sapiens
cuuccagucgaggauguuuaca

SEQ ID NO: 1657 - RNA, 22 nt, Homo sapiens
gaaguaaacauccaccucccag

SEQ ID NO: 1658 - RNA, 22 nt, Homo sapiens
agcugaguguaggauguuuaca

SEQ ID NO: 1659 - RNA, 22 nt, Homo sapiens
ggaguaaacaacccucucccag

SEQ ID NO: 1660 - RNA, 22 nt, Homo sapiens
agaguaaacagccuucucccag

SEQ ID NO: 1661 - RNA, 23 nt, Homo sapiens
gcugagaguguaggauguuuaca

SEQ ID NO: 1662 - RNA, 22 nt, Homo sapiens
gcagcaaacaucugacugaaag

SEQ ID NO: 1663 - RNA, 22 nt, Homo sapiens
cuuccagucggggauguuuaca

SEQ ID NO: 1664 - RNA, 22 nt, Homo sapiens
gcuguaaacauccgacugaaag

SEQ ID NO: 1665 - RNA, 22 nt, Homo sapiens
cuuccagucaaggauguuuaca

SEQ ID NO: 1666 - RNA, 20 nt, Homo sapiens
accaacuaguaaacccauau

SEQ ID NO: 1667 - RNA, 22 nt, Homo sapiens
agucccuacuauguuccaggca

SEQ ID NO: 1668 - RNA, 21 nt, Homo sapiens
cuggcacuauaugaguccuau

SEQ ID NO: 1669 - RNA, 20 nt, Homo sapiens
auaugacucguauagugucu

SEQ ID NO: 1670 - RNA, 23 nt, Homo sapiens
agaauuuucauaaugcagucaca

SEQ ID NO: 1671 - RNA, 20 nt, Homo sapiens
gccaucaaaguuaaaagcca

SEQ ID NO: 1672 - RNA, 21 nt, Homo sapiens
ugccugucuacacuugcugug

SEQ ID NO: 1673 - RNA, 21 nt, Homo sapiens
uguacagcaggcacagacagg

SEQ ID NO: 1674 - RNA, 22 nt, Homo sapiens
uguccuuugccuacucuauuua

SEQ ID NO: 1675 - RNA, 22 nt, Homo sapiens
cuuaaauagaauaggcaaagga

SEQ ID NO: 1676 - RNA, 22 nt, Homo sapiens
aagaccguccucuugucccaac

SEQ ID NO: 1677 - RNA, 17 nt, Homo sapiens
gauuaaacaauucucug

SEQ ID NO: 1678 - RNA, 22 nt, Homo sapiens
acuucacgggagugaggaaagu

SEQ ID NO: 1679 - RNA, 21 nt, Homo sapiens
gacuuugccuucgcccgcgaa

SEQ ID NO: 1680 - RNA, 20 nt, Homo sapiens
ucucuccacagcuuccucua

SEQ ID NO: 1681 - RNA, 22 nt, Homo sapiens
ucugugugacggaugccagaug

SEQ ID NO: 1682 - RNA, 22 nt, Homo sapiens
ugcuucuggcaucugucccuca

SEQ ID NO: 1683 - RNA, 22 nt, Homo sapiens
ccagcaggccugcagaagggga

SEQ ID NO: 1684 - RNA, 23 nt, Homo sapiens
cuucccauuccacaagcccugau

SEQ ID NO: 1685 - RNA, 23 nt, Homo sapiens
augagaguuuuuuacuugccaga

SEQ ID NO: 1686 - RNA, 22 nt, Homo sapiens
gcagcaguguagagauuaguuu

SEQ ID NO: 1687 - RNA, 22 nt, Homo sapiens
aaaccaaucucuacacuacugc

SEQ ID NO: 1688 - RNA, 21 nt, Homo sapiens
uuacccagucuccggugcagc

SEQ ID NO: 1689 - RNA, 21 nt, Homo sapiens
ggcugcaccggagacugggua

SEQ ID NO: 1690 - RNA, 23 nt, Homo sapiens
aaggcccuuccaccaguccucga

SEQ ID NO: 1691 - RNA, 24 nt, Homo sapiens
uccucugagcuccuucucuaccca

SEQ ID NO: 1692 - RNA, 22 nt, Homo sapiens
auuggguuuuaagaguucuuua

SEQ ID NO: 1693 - RNA, 23 nt, Homo sapiens
aauauguagucuuuuauccauca

SEQ ID NO: 1694 - RNA, 22 nt, Homo sapiens
cacugcagucucagccuaggca

SEQ ID NO: 1695 - RNA, 22 nt, Homo sapiens
caccacugcacucgcuccagcc

SEQ ID NO: 1696 - RNA, 22 nt, Homo sapiens
acuaacugaauagguugggcca

SEQ ID NO: 1697 - RNA, 23 nt, Homo sapiens
aaugacccuaccuauucagucag

SEQ ID NO: 1698 - RNA, 24 nt, Homo sapiens
accccauugcucccaggcuacaga

SEQ ID NO: 1699 - RNA, 24 nt, Homo sapiens
acucccucuaccucacuguccaca

SEQ ID NO: 1700 - RNA, 23 nt, Homo sapiens
aacaggcaucuguugagcuccua

SEQ ID NO: 1701 - RNA, 22 nt, Homo sapiens
auggcaauauguuggcauagca

SEQ ID NO: 1702 - RNA, 22 nt, Homo sapiens
acuaccugaauucccaaaagcu

SEQ ID NO: 1703 - RNA, 21 nt, Homo sapiens
aaagcuuuugguaauucaggu

SEQ ID NO: 1704 - RNA, 19 nt, Homo sapiens
uccuccuccacccgcccuc

SEQ ID NO: 1705 - RNA, 22 nt, Homo sapiens
ucugaagguucagaaaggccuu

SEQ ID NO: 1706 - RNA, 25 nt, Homo sapiens
cgaaagaagcgcuuuacaauguuau

SEQ ID NO: 1707 - RNA, 22 nt, Homo sapiens
uaaagagaccgaacagguauau

SEQ ID NO: 1708 - RNA, 22 nt, Homo sapiens
cuauauaucucuuugguccccu

SEQ ID NO: 1709 - RNA, 24 nt, Homo sapiens
caauuccaaacacucaaaauaucu

SEQ ID NO: 1710 - RNA, 22 nt, Homo sapiens
ugaguuuugaguguuuggaguu

SEQ ID NO: 1711 - RNA, 22 nt, Homo sapiens
ccauucuuucuauccuagcaug

SEQ ID NO: 1712 - RNA, 24 nt, Homo sapiens
ucacacccuccucacugcccaacc

SEQ ID NO: 1713 - RNA, 22 nt, Homo sapiens
aagcacacaccaguuuuuucca

SEQ ID NO: 1714 - RNA, 23 nt, Homo sapiens
auacacacacauauccauacaaa

SEQ ID NO: 1715 - RNA, 22 nt, Homo sapiens
ccaaccucgaggaucuccccag

SEQ ID NO: 1716 - RNA, 22 nt, Homo sapiens
gcugaggagaucgucgagguug

SEQ ID NO: 1717 - RNA, 21 nt, Homo sapiens
ccaaccucgacgaucuccuca

SEQ ID NO: 1718 - RNA, 22 nt, Homo sapiens
gcuggggagauccucgagguug

SEQ ID NO: 1719 - RNA, 21 nt, Homo sapiens
accugaucccauugccccacc

SEQ ID NO: 1720 - RNA, 22 nt, Homo sapiens
uuauugccccuauucuaacaca

SEQ ID NO: 1721 - RNA, 22 nt, Homo sapiens
cuuguguuagaacagaggcaau

SEQ ID NO: 1722 - RNA, 23 nt, Homo sapiens
aaaugucccuacucgcuuucccc

SEQ ID NO: 1723 - RNA, 22 nt, Homo sapiens
ucugcucccaacuccccuucug

SEQ ID NO: 1724 - RNA, 21 nt, Homo sapiens
aguucccacugcagagccugg

SEQ ID NO: 1725 - RNA, 18 nt, Homo sapiens
ucccacugcagagccugg

SEQ ID NO: 1726 - RNA, 21 nt, Homo sapiens
agaaagaucuggaagugggag

SEQ ID NO: 1727 - RNA, 22 nt, Homo sapiens
ugucucccacuuccagaucuuu

SEQ ID NO: 1728 - RNA, 22 nt, Homo sapiens
agcuucagcuagacuagggcag

SEQ ID NO: 1729 - RNA, 22 nt, Homo sapiens
agacugcacuagccuggcugaa

SEQ ID NO: 1730 - RNA, 22 nt, Homo sapiens
guccugcagagaggaagcccuu

SEQ ID NO: 1731 - RNA, 21 nt, Homo sapiens
gaagggcuuccucucugcagg

SEQ ID NO: 1732 - RNA, 22 nt, Homo sapiens
guggccgacacuuguaauccua

SEQ ID NO: 1733 - RNA, 21 nt, Homo sapiens
agcuaugccagcaucuugccu

SEQ ID NO: 1734 - RNA, 22 nt, Homo sapiens
ugggcuuucuagucucagcucu

SEQ ID NO: 1735 - RNA, 22 nt, Homo sapiens
ggagagcugagacuagaaagcc

SEQ ID NO: 1736 - RNA, 23 nt, Homo sapiens
aucugggccucuguucuuaucag

SEQ ID NO: 1737 - RNA, 21 nt, Homo sapiens
uggggaguggagggguaggga

SEQ ID NO: 1738 - RNA, 23 nt, Homo sapiens
cuccccacccuucuacucccuaa

SEQ ID NO: 1739 - RNA, 22 nt, Homo sapiens
gucuuacugcccucauuuuaua

SEQ ID NO: 1740 - RNA, 22 nt, Homo sapiens
cgccauuucccuuaaagucaca

SEQ ID NO: 1741 - RNA, 22 nt, Homo sapiens
ugaggucacauugcauccaccu

SEQ ID NO: 1742 - RNA, 23 nt, Homo sapiens
uaggccaguaggcauugucugcg

SEQ ID NO: 1743 - RNA, 22 nt, Homo sapiens
acaccaguauuucugaaauccu

SEQ ID NO: 1744 - RNA, 17 nt, Homo sapiens
gucugacuguagaacuc

SEQ ID NO: 1745 - RNA, 22 nt, Homo sapiens
cuaugugccaagcacaguccua

SEQ ID NO: 1746 - RNA, 22 nt, Homo sapiens
acugucugucucagaaccccag

SEQ ID NO: 1747 - RNA, 24 nt, Homo sapiens
gauauauacagauuccauacaucu

SEQ ID NO: 1748 - RNA, 22 nt, Homo sapiens
uggccugccuauuuccuccuuu

SEQ ID NO: 1749 - RNA, 22 nt, Homo sapiens
aaaggagaaaacaggcagggca

SEQ ID NO: 1750 - RNA, 23 nt, Homo sapiens
ggcucugcaucucuaacucacua

SEQ ID NO: 1751 - RNA, 22 nt, Homo sapiens
acgucacugcguucucuccccg

SEQ ID NO: 1752 - RNA, 19 nt, Homo sapiens
ccgguagucccaggccagu

SEQ ID NO: 1753 - RNA, 21 nt, Homo sapiens
acguguccccagugccgugca

SEQ ID NO: 1754 - RNA, 23 nt, Homo sapiens
agcgccuggcacguguguacaca

SEQ ID NO: 1755 - RNA, 17 nt, Homo sapiens
cgauccggccgcgcccc

SEQ ID NO: 1756 - RNA, 22 nt, Homo sapiens
acguuuaaauuucaccccuucu

SEQ ID NO: 1757 - RNA, 19 nt, Homo sapiens
cuccggaagcuccgcccca

SEQ ID NO: 1758 - RNA, 22 nt, Homo sapiens
ggccuccggaagcuccgcccca

SEQ ID NO: 1759 - RNA, 25 nt, Homo sapiens
cgacguggggcggagcgucuggaag

SEQ ID NO: 1760 - RNA, 19 nt, Homo sapiens
ccggcgccgagggcccgau

SEQ ID NO: 1761 - RNA, 17 nt, Homo sapiens
gacuacacuacagaagc

SEQ ID NO: 1762 - RNA, 22 nt, Homo sapiens
uccgagcgacuccgagagaggc

SEQ ID NO: 1763 - RNA, 23 nt, Homo sapiens
ugaggggcagagagcgagacuuu

SEQ ID NO: 1764 - RNA, 24 nt, Homo sapiens
aaaagcucggucugaggccccuca

SEQ ID NO: 1765 - RNA, 23 nt, Homo sapiens
ccgcagaccgaccgccuucuucu

SEQ ID NO: 1766 - RNA, 21 nt, Homo sapiens
caaagccaucucuccgcguga

SEQ ID NO: 1767 - RNA, 22 nt, Homo sapiens
aagccacguagacagacgccug

SEQ ID NO: 1768 - RNA, 20 nt, Homo sapiens
ccgcgcagccccauggccaa

SEQ ID NO: 1769 - RNA, 23 nt, Homo sapiens
ccuucagccacacgcugcccagg

SEQ ID NO: 1770 - RNA, 23 nt, Homo sapiens
ccccguauccgcacaaagccucu

SEQ ID NO: 1771 - RNA, 21 nt, Homo sapiens
cuaccccaucagacccaaggg

SEQ ID NO: 1772 - RNA, 25 nt, Homo sapiens
uccuacccagggcacagauggggca

SEQ ID NO: 1773 - RNA, 23 nt, Homo sapiens
ucucuggccgucuaccuuccaca

SEQ ID NO: 1774 - RNA, 20 nt, Homo sapiens
uggggacguagcuggccaga

SEQ ID NO: 1775 - RNA, 23 nt, Homo sapiens
cugucuggccagcuacgucccca

SEQ ID NO: 1776 - RNA, 22 nt, Homo sapiens
uggaagguagacggccagagag

SEQ ID NO: 1777 - RNA, 23 nt, Homo sapiens
uuccacugcuacaaccucccaga

SEQ ID NO: 1778 - RNA, 22 nt, Homo sapiens
acuccucagauccuacgcagga

SEQ ID NO: 1779 - RNA, 22 nt, Homo sapiens
acugccagugagcagcagagcu

SEQ ID NO: 1780 - RNA, 21 nt, Homo sapiens
cagcccuccugguggcuggcc

SEQ ID NO: 1781 - RNA, 17 nt, Homo sapiens
aacccgggcccggcgcg

SEQ ID NO: 1782 - RNA, 18 nt, Homo sapiens
gaggccccugccgccccg

SEQ ID NO: 1783 - RNA, 23 nt, Homo sapiens
cgccuuuccgagccugcgccucc

SEQ ID NO: 1784 - RNA, 22 nt, Homo sapiens
ucuccauuccccaggacuccac

SEQ ID NO: 1785 - RNA, 23 nt, Homo sapiens
aacuuucuccuaaggcagucccu

SEQ ID NO: 1786 - RNA, 22 nt, Homo sapiens
cagaccugaguagcgcaaggug

SEQ ID NO: 1787 - RNA, 22 nt, Homo sapiens
accuugugcgccuucucagauu

SEQ ID NO: 1788 - RNA, 17 nt, Homo sapiens
auuuuucuucauauccc

SEQ ID NO: 1789 - RNA, 22 nt, Homo sapiens
auuaaagcucuucucccuucca

SEQ ID NO: 1790 - RNA, 22 nt, Homo sapiens
ucgcccucucaacccagcuuuu

SEQ ID NO: 1791 - RNA, 22 nt, Homo sapiens
uugcccucucaacccagcuuuu

SEQ ID NO: 1792 - RNA, 20 nt, Homo sapiens
acccucucaacccagcuuuu

SEQ ID NO: 1793 - RNA, 19 nt, Homo sapiens
uccucucaacccagcuuuu

SEQ ID NO: 1794 - RNA, 18 nt, Homo sapiens
ccuucucaacccagcuuu

SEQ ID NO: 1795 - RNA, 21 nt, Homo sapiens
agaggucgaccguguaaugug

SEQ ID NO: 1796 - RNA, 22 nt, Homo sapiens
gcgaacgcgccacggaccaccu

SEQ ID NO: 1797 - RNA, 22 nt, Homo sapiens
aagaggucgaccguguauuggg

SEQ ID NO: 1798 - RNA, 23 nt, Homo sapiens
ugcgaacucaccacggacaaccu

SEQ ID NO: 1799 - RNA, 22 nt, Homo sapiens
aaauaucacacacacuaaauug

SEQ ID NO: 1800 - RNA, 20 nt, Homo sapiens
ccagcagcaccuggggcagu

SEQ ID NO: 1801 - RNA, 23 nt, Homo sapiens
acaccaaugcccuaggggaugcg

SEQ ID NO: 1802 - RNA, 23 nt, Homo sapiens
acacuuacuggacaccuacuagg

SEQ ID NO: 1803 - RNA, 22 nt, Homo sapiens
ugcaacuuaguaaugugcaaua

SEQ ID NO: 1804 - RNA, 20 nt, Homo sapiens
cuggaggaagggcccagagg

SEQ ID NO: 1805 - RNA, 22 nt, Homo sapiens
acggaagggcagagagggccag

SEQ ID NO: 1806 - RNA, 22 nt, Homo sapiens
aaagagguuaaccagguguguu

SEQ ID NO: 1807 - RNA, 23 nt, Homo sapiens
ucucugcaggccgugugcuuugc

SEQ ID NO: 1808 - RNA, 22 nt, Homo sapiens
gccuaagacacaggcccagaga

SEQ ID NO: 1809 - RNA, 21 nt, Homo sapiens
uucuaggauaggcccaggggc

SEQ ID NO: 1810 - RNA, 22 nt, Homo sapiens
ggaucccugggaccauaccuag

SEQ ID NO: 1811 - RNA, 22 nt, Homo sapiens
ggucaggagcaauaaugaaaaa

SEQ ID NO: 1812 - RNA, 23 nt, Homo sapiens
acauuuuucguuauugcucuuga

SEQ ID NO: 1813 - RNA, 22 nt, Homo sapiens
gaagaaaggcaucauauaggag

SEQ ID NO: 1814 - RNA, 21 nt, Homo sapiens
aacuccuguaugaagccguuc

SEQ ID NO: 1815 - RNA, 22 nt, Homo sapiens
caacaaaaucacugaugcugga

SEQ ID NO: 1816 - RNA, 22 nt, Homo sapiens
cacucagcaccaggauauuguu

SEQ ID NO: 1817 - RNA, 23 nt, Homo sapiens
cggcucugucgucgaggcgcuca

SEQ ID NO: 1818 - RNA, 23 nt, Homo sapiens
cgugagcuccuggaggacaggga

SEQ ID NO: 1819 - RNA, 22 nt, Homo sapiens
gugaugcacuguggaaacauug

SEQ ID NO: 1820 - RNA, 21 nt, Homo sapiens
ugcaaugcaacuacaaugcac

SEQ ID NO: 1821 - RNA, 22 nt, Homo sapiens
gggcugcacugccgaggcacug

SEQ ID NO: 1822 - RNA, 20 nt, Homo sapiens
gcaaugcaacagcaaugcac

SEQ ID NO: 1823 - RNA, 22 nt, Homo sapiens
gcuauaaaguaacugagacgga

SEQ ID NO: 1824 - RNA, 22 nt, Homo sapiens
aaucagucucauugcuuuauaa

SEQ ID NO: 1825 - RNA, 23 nt, Homo sapiens
acgggugcgauuucugugugaga

SEQ ID NO: 1826 - RNA, 21 nt, Homo sapiens
ucaaucacagauagcaccccu

SEQ ID NO: 1827 - RNA, 22 nt, Homo sapiens
cuccagaccccucguucagggc

SEQ ID NO: 1828 - RNA, 22 nt, Homo sapiens
gagcccuggacuaggagucagc

SEQ ID NO: 1829 - RNA, 23 nt, Homo sapiens
agaggcaggcaugcgggcagaca

SEQ ID NO: 1830 - RNA, 22 nt, Homo sapiens
agggcaguauacuugcugauug

SEQ ID NO: 1831 - RNA, 22 nt, Homo sapiens
acaaccagcuaagacacugcca

SEQ ID NO: 1832 - RNA, 22 nt, Homo sapiens
auggcaguggaguuagugauug

SEQ ID NO: 1833 - RNA, 23 nt, Homo sapiens
caaucagcuaaugacacugccua

SEQ ID NO: 1834 - RNA, 22 nt, Homo sapiens
ccuggccgugugguuagugauu

SEQ ID NO: 1835 - RNA, 23 nt, Homo sapiens
gcaaucagcuaacuacacugccu

SEQ ID NO: 1836 - RNA, 24 nt, Homo sapiens
uggaagacuagugauuuuguuguu

SEQ ID NO: 1837 - RNA, 22 nt, Homo sapiens
aacaacaaaucccagucuaccu

SEQ ID NO: 1838 - RNA, 22 nt, Homo sapiens
guggagugugacaaugguguuu

SEQ ID NO: 1839 - RNA, 23 nt, Homo sapiens
ucaaacgccauuaucacacuaaa

SEQ ID NO: 1840 - RNA, 23 nt, Homo sapiens
cuagaggacagguaacacggagg

SEQ ID NO: 1841 - RNA, 23 nt, Homo sapiens
ggcuuccuugcuauccauccuca

SEQ ID NO: 1842 - RNA, 21 nt, Homo sapiens
cuaaguagugaaagaaauuuu

SEQ ID NO: 1843 - RNA, 21 nt, Homo sapiens
aauuaaaauagccuucacuaa

SEQ ID NO: 1844 - RNA, 20 nt, Homo sapiens
caucagaaagcguuuacagu

SEQ ID NO: 1845 - RNA, 22 nt, Homo sapiens
acugauuugcuucaucacaugc

SEQ ID NO: 1846 - RNA, 24 nt, Homo sapiens
cagccaguauuacucaucacuuug

SEQ ID NO: 1847 - RNA, 20 nt, Homo sapiens
cggcgccuccuuuccgauuc

SEQ ID NO: 1848 - RNA, 21 nt, Homo sapiens
uaagaauuucuuucuucacaa

SEQ ID NO: 1849 - RNA, 22 nt, Homo sapiens
uccauuucucaagaugccuccu

SEQ ID NO: 1850 - RNA, 24 nt, Homo sapiens
gaaggguugggcuuuuuuuuuugu

SEQ ID NO: 1851 - RNA, 22 nt, Homo sapiens
gaacaaaaaaaaaaguacaaca

SEQ ID NO: 1852 - RNA, 23 nt, Homo sapiens
aaaucagaaucacaccuggggga

SEQ ID NO: 1853 - RNA, 23 nt, Homo sapiens
aaaacaccaagaucugaaggcua

SEQ ID NO: 1854 - RNA, 23 nt, Homo sapiens
gggcagccuucagauccaagugg

SEQ ID NO: 1855 - RNA, 21 nt, Homo sapiens
gagccgcgaggagccgagaga

SEQ ID NO: 1856 - RNA, 22 nt, Homo sapiens
guaccccuggagauucugauaa

SEQ ID NO: 1857 - RNA, 23 nt, Homo sapiens
gccugcaucaugaaaugcccucg

SEQ ID NO: 1858 - RNA, 22 nt, Homo sapiens
acauaucaugagugcacuucau

SEQ ID NO: 1859 - RNA, 23 nt, Homo sapiens
agaaaggacauagggugcugaug

SEQ ID NO: 1860 - RNA, 22 nt, Homo sapiens
cccaucuugcaacuaugucuuu

SEQ ID NO: 1861 - RNA, 22 nt, Homo sapiens
gcucuuuucauuaauguagaca

SEQ ID NO: 1862 - RNA, 22 nt, Homo sapiens
ccacagcaggcaggaugguccc

SEQ ID NO: 1863 - RNA, 22 nt, Homo sapiens
gcugcaccagccugccugcuga

SEQ ID NO: 1864 - RNA, 22 nt, Homo sapiens
cugggugcgggaugcaggguga

SEQ ID NO: 1865 - RNA, 22 nt, Homo sapiens
ggcccagcccagcccagcccac

SEQ ID NO: 1866 - RNA, 20 nt, Homo sapiens
ccugcagaccccgacccgcg

SEQ ID NO: 1867 - RNA, 22 nt, Homo sapiens
acaggcaugggaggucagguga

SEQ ID NO: 1868 - RNA, 22 nt, Homo sapiens
cucaccugagcucccgugccug

SEQ ID NO: 1869 - RNA, 21 nt, Homo sapiens
caggcacgggagcucagguga

SEQ ID NO: 1870 - RNA, 20 nt, Homo sapiens
ucaccugaccucccaugccu

SEQ ID NO: 1871 - RNA, 22 nt, Homo sapiens
ugaauccuugaauagguguguu

SEQ ID NO: 1872 - RNA, 24 nt, Homo sapiens
acucacaccuagguuccaaggauu

SEQ ID NO: 1873 - RNA, 22 nt, Homo sapiens
uacagauggauaccgugcaauu

SEQ ID NO: 1874 - RNA, 22 nt, Homo sapiens
aaauugcaucgugauccacccg

SEQ ID NO: 1875 - RNA, 22 nt, Homo sapiens
ugggcugggcucauuucauuuu

SEQ ID NO: 1876 - RNA, 21 nt, Homo sapiens
cccucggcgauccccgcggcu

SEQ ID NO: 1877 - RNA, 19 nt, Homo sapiens
cuuagacacucaggucccu

SEQ ID NO: 1878 - RNA, 19 nt, Homo sapiens
ggacucuacagacacaccu

SEQ ID NO: 1879 - RNA, 24 nt, Homo sapiens
ucauguaccagcgaccgggcuaug

SEQ ID NO: 1880 - RNA, 18 nt, Homo sapiens
uccucacaccuccagccg

SEQ ID NO: 1881 - RNA, 18 nt, Homo sapiens
cuucagucaacuucuuag

SEQ ID NO: 1882 - RNA, 19 nt, Homo sapiens
uuccucagcuuguccaguc

SEQ ID NO: 1883 - RNA, 21 nt, Homo sapiens
agcaacaccgcagcgacaagc

SEQ ID NO: 1884 - RNA, 17 nt, Homo sapiens
ccacccccgcacccgcc

SEQ ID NO: 1885 - RNA, 21 nt, Homo sapiens
aaucaccaauaaugggacaca

SEQ ID NO: 1886 - RNA, 22 nt, Homo sapiens
aucuccaugguguuuucuuaaa

SEQ ID NO: 1887 - RNA, 21 nt, Homo sapiens
ugcccucguagacaacacuca

SEQ ID NO: 1888 - RNA, 22 nt, Homo sapiens
auaaggauuuuuaggggcauua

SEQ ID NO: 1889 - RNA, 23 nt, Homo sapiens
cacaucugcccccaaaagucccu

SEQ ID NO: 1890 - RNA, 22 nt, Homo sapiens
auaaggauuuuuaggggcauua

SEQ ID NO: 1891 - RNA, 22 nt, Homo sapiens
acagcugccccugaaagucccu

SEQ ID NO: 1892 - RNA, 21 nt, Homo sapiens
ucaaaaugcucuccugucagu

SEQ ID NO: 1893 - RNA, 22 nt, Homo sapiens
cagcuguccgagucccagguca

SEQ ID NO: 1894 - RNA, 24 nt, Homo sapiens
caucagucacuacucaucauuuuc

SEQ ID NO: 1895 - RNA, 23 nt, Homo sapiens
gcgcccggccuguguggugcuca

SEQ ID NO: 1896 - RNA, 21 nt, Homo sapiens
ccgagcaccacgcagaccagc

SEQ ID NO: 1897 - RNA, 22 nt, Homo sapiens
aacucugucuuuacuccugaga

SEQ ID NO: 1898 - RNA, 22 nt, Homo sapiens
acucaugagugaagacagaguu

SEQ ID NO: 1899 - RNA, 18 nt, Homo sapiens
cgccgccccgcaccugcu

SEQ ID NO: 1900 - RNA, 21 nt, Homo sapiens
ucggcaucuacacuugcacug

SEQ ID NO: 1901 - RNA, 22 nt, Homo sapiens
aaagacccauggagaggaaggu

SEQ ID NO: 1902 - RNA, 22 nt, Homo sapiens
accuucuccucaaugggucuuu

SEQ ID NO: 1903 - RNA, 21 nt, Homo sapiens
auuuugaucaaucucuacauu

SEQ ID NO: 1904 - RNA, 23 nt, Homo sapiens
uauauuccguauacauauuccgu

SEQ ID NO: 1905 - RNA, 24 nt, Homo sapiens
uagagaaggacagcugugagcucu

SEQ ID NO: 1906 - RNA, 22 nt, Homo sapiens
ugcagacuaguccuuauuugau

SEQ ID NO: 1907 - RNA, 23 nt, Homo sapiens
aagauguuuuacaugagucucau

SEQ ID NO: 1908 - RNA, 21 nt, Homo sapiens
uauuccguauauacauuccau

SEQ ID NO: 1909 - RNA, 22 nt, Homo sapiens
ucaccauugcuaaagugcaauu

SEQ ID NO: 1910 - RNA, 22 nt, Homo sapiens
ggccaaucuuagguucuacaau

SEQ ID NO: 1911 - RNA, 22 nt, Homo sapiens
uugggggaguuccuuagagaug

SEQ ID NO: 1912 - RNA, 23 nt, Homo sapiens
gaaaucucuacagaagccccaua

SEQ ID NO: 1913 - RNA, 22 nt, Homo sapiens
agaguugcauauuagcaacagu

SEQ ID NO: 1914 - RNA, 20 nt, Homo sapiens
aaagcgugggggaaacacgg

SEQ ID NO: 1915 - RNA, 15 nt, Homo sapiens
aacccaggaucuccu

SEQ ID NO: 1916 - RNA, 22 nt, Homo sapiens
ggccguggccagagcccacgag

SEQ ID NO: 1917 - RNA, 22 nt, Homo sapiens
cacugcagggcucuggccacug

SEQ ID NO: 1918 - RNA, 22 nt, Homo sapiens
ccgguccguacaaacucugcag

SEQ ID NO: 1919 - RNA, 20 nt, Homo sapiens
cacagcagaguuuguacgga

SEQ ID NO: 1920 - RNA, 22 nt, Homo sapiens
gaugaagauuacuggggggaag

SEQ ID NO: 1921 - RNA, 23 nt, Homo sapiens
uccccuucccugccauauccuca

SEQ ID NO: 1922 - RNA, 23 nt, Homo sapiens
ccuacucccagggucaugcaaaa

SEQ ID NO: 1923 - RNA, 22 nt, Homo sapiens
ugcacaauccugugagugaguc

SEQ ID NO: 1924 - RNA, 22 nt, Homo sapiens
aguaguggaugaagcacugugu

SEQ ID NO: 1925 - RNA, 22 nt, Homo sapiens
gcacagagugcaucauccacua

SEQ ID NO: 1926 - RNA, 21 nt, Homo sapiens
cuaccuccaccuguaucauca

SEQ ID NO: 1927 - RNA, 22 nt, Homo sapiens
augauaacacagguagaaguag

SEQ ID NO: 1928 - RNA, 22 nt, Homo sapiens
ugauacuacuuccaaugucgca

SEQ ID NO: 1929 - RNA, 21 nt, Homo sapiens
aaggacguguacuaggucuaa

SEQ ID NO: 1930 - RNA, 22 nt, Homo sapiens
agucuucagguaggguaggaaa

SEQ ID NO: 1931 - RNA, 22 nt, Homo sapiens
ucauuuacuuucucuuacagau

SEQ ID NO: 1932 - RNA, 24 nt, Homo sapiens
acgucgcacgaacgccuguccggg

SEQ ID NO: 1933 - RNA, 22 nt, Homo sapiens
agaguggcaaagucuuuccaua

SEQ ID NO: 1934 - RNA, 21 nt, Homo sapiens
auauggaaagacuuugccacu

SEQ ID NO: 1935 - RNA, 22 nt, Homo sapiens
accacgauaucacaccucccag

SEQ ID NO: 1936 - RNA, 22 nt, Homo sapiens
ucccaggaaccaugauaucaca

SEQ ID NO: 1937 - RNA, 22 nt, Homo sapiens
accacaauaucacaccucccag

SEQ ID NO: 1938 - RNA, 22 nt, Homo sapiens
ucccaggaaccaugauaucaca

SEQ ID NO: 1939 - RNA, 22 nt, Homo sapiens
accacaauaucacaccucccag

SEQ ID NO: 1940 - RNA, 22 nt, Homo sapiens
cgagugugagaucacaccuccc

SEQ ID NO: 1941 - RNA, 22 nt, Homo sapiens
ucccaggaaccaugauaucaca

SEQ ID NO: 1942 - RNA, 22 nt, Homo sapiens
ucccaggaagcacgauaucaca

SEQ ID NO: 1943 - RNA, 23 nt, Homo sapiens
cuuugucuacgcuggguccaggu

SEQ ID NO: 1944 - RNA, 22 nt, Homo sapiens
gagaggaugacgcagacuuggu

SEQ ID NO: 1945 - RNA, 23 nt, Homo sapiens
guaccgagucuccaucauccacu

SEQ ID NO: 1946 - RNA, 24 nt, Homo sapiens
acuucugcagugucaguguggaac

SEQ ID NO: 1947 - RNA, 24 nt, Homo sapiens
caguauccacuccugaccagcagg

SEQ ID NO: 1948 - RNA, 21 nt, Homo sapiens
aaagaucaaccauguauuauu

SEQ ID NO: 1949 - RNA, 22 nt, Homo sapiens
gcgaauauaacacggucgaucu

SEQ ID NO: 1950 - RNA, 22 nt, Homo sapiens
accagguuccaccccagcaggc

SEQ ID NO: 1951 - RNA, 20 nt, Homo sapiens
accauccccaaacggauacc

SEQ ID NO: 1952 - RNA, 22 nt, Homo sapiens
acaggggagcacugcugccuuc

SEQ ID NO: 1953 - RNA, 23 nt, Homo sapiens
acacucaaaagauggcggcacuu

SEQ ID NO: 1954 - RNA, 20 nt, Homo sapiens
agugcccccacaguuugagu

SEQ ID NO: 1955 - RNA, 23 nt, Homo sapiens
gcacucaaacugugggggcacuu

SEQ ID NO: 1956 - RNA, 22 nt, Homo sapiens
aaagugccgccaucuuuugagu

SEQ ID NO: 1957 - RNA, 23 nt, Homo sapiens
acgcucaaaugucgcagcacuuu

SEQ ID NO: 1958 - RNA, 23 nt, Homo sapiens
acaccccaaaaucgaagcacuuc

SEQ ID NO: 1959 - RNA, 22 nt, Homo sapiens
ggaaagcgcccccauuuugagu

SEQ ID NO: 1960 - RNA, 22 nt, Homo sapiens
aauuacaauacaaucugauaag

SEQ ID NO: 1961 - RNA, 22 nt, Homo sapiens
cacuuaucagguuguauuauaa

SEQ ID NO: 1962 - RNA, 22 nt, Homo sapiens
aaugauaauacaaccugcuaag

SEQ ID NO: 1963 - RNA, 22 nt, Homo sapiens
cacuuagcagguuguauuauau

SEQ ID NO: 1964 - RNA, 22 nt, Homo sapiens
auauaauacaaccugcuaagug

SEQ ID NO: 1965 - RNA, 22 nt, Homo sapiens
agcacuuagcagguuguauuau

SEQ ID NO: 1966 - RNA, 22 nt, Homo sapiens
ucacgcgagccgaacgaacaaa

SEQ ID NO: 1967 - RNA, 21 nt, Homo sapiens
accauagaaggaaaaucuacc

SEQ ID NO: 1968 - RNA, 21 nt, Homo sapiens
acguggauuuuccucuaugau

SEQ ID NO: 1969 - RNA, 22 nt, Homo sapiens
uacucauagaaggagaaucuac

SEQ ID NO: 1970 - RNA, 22 nt, Homo sapiens
aacauggauuuuccucuaugau

SEQ ID NO: 1971 - RNA, 22 nt, Homo sapiens
aaacauagaaggaauauccacg

SEQ ID NO: 1972 - RNA, 21 nt, Homo sapiens
acguggaauuuccucuauguu

SEQ ID NO: 1973 - RNA, 21 nt, Homo sapiens
aacauagaaggaauauccacc

SEQ ID NO: 1974 - RNA, 22 nt, Homo sapiens
acaaaaguugccuuugugugau

SEQ ID NO: 1975 - RNA, 22 nt, Homo sapiens
gaauucaccaagggcaaccucu

SEQ ID NO: 1976 - RNA, 21 nt, Homo sapiens
ccuucugacuccaaguccagu

SEQ ID NO: 1977 - RNA, 22 nt, Homo sapiens
acacaggaccuggagucaggag

SEQ ID NO: 1978 - RNA, 19 nt, Homo sapiens
uucugccuccaaguccagu

SEQ ID NO: 1979 - RNA, 25 nt, Homo sapiens
ccacucuucugacuccaaguccagu

SEQ ID NO: 1980 - RNA, 20 nt, Homo sapiens
uuucugacuccaaguccagu

SEQ ID NO: 1981 - RNA, 19 nt, Homo sapiens
uccugacuccaaguccagu

SEQ ID NO: 1982 - RNA, 20 nt, Homo sapiens
cuucuggcuccaaguccagu

SEQ ID NO: 1983 - RNA, 20 nt, Homo sapiens
cuucugacuccaagcccagu

SEQ ID NO: 1984 - RNA, 21 nt, Homo sapiens
ccaucugacaccaaguccagu

SEQ ID NO: 1985 - RNA, 21 nt, Homo sapiens
ccuucugacuccuaguccagu

SEQ ID NO: 1986 - RNA, 19 nt, Homo sapiens
uucuggcuccaaauccagu

SEQ ID NO: 1987 - RNA, 22 nt, Homo sapiens
aguuaguggaccauguuacaua

SEQ ID NO: 1988 - RNA, 21 nt, Homo sapiens
ccuacguuccauagucuacca

SEQ ID NO: 1989 - RNA, 22 nt, Homo sapiens
aagauguggaccauauuacaua

SEQ ID NO: 1990 - RNA, 22 nt, Homo sapiens
gcgcauguucuauggucaacca

SEQ ID NO: 1991 - RNA, 22 nt, Homo sapiens
acagagagcuugcccuuguaua

SEQ ID NO: 1992 - RNA, 22 nt, Homo sapiens
auauacaaagggcaaccucgcu

SEQ ID NO: 1993 - RNA, 21 nt, Homo sapiens
aaguguuguccgugaaugauu

SEQ ID NO: 1994 - RNA, 22 nt, Homo sapiens
cgaauccaccacgaacaacuuc

SEQ ID NO: 1995 - RNA, 22 nt, Homo sapiens
agccacaaucaccuucugaucu

SEQ ID NO: 1996 - RNA, 20 nt, Homo sapiens
uaugaacaauuucuaggaau

SEQ ID NO: 1997 - RNA, 22 nt, Homo sapiens
ugugagccagccuggagcaccu

SEQ ID NO: 1998 - RNA, 22 nt, Homo sapiens
aaacagucuaccuacauugcuc

SEQ ID NO: 1999 - RNA, 22 nt, Homo sapiens
agacugcaggcccuagaggaca

SEQ ID NO: 2000 - RNA, 20 nt, Homo sapiens
ugucuugguuuuaugccuuu

SEQ ID NO: 2001 - RNA, 22 nt, Homo sapiens
ugccuccuccaggauccacaca

SEQ ID NO: 2002 - RNA, 21 nt, Homo sapiens
acauguccauauuaugcguua

SEQ ID NO: 2003 - RNA, 22 nt, Homo sapiens
uuugggacugaucuugaugucu

SEQ ID NO: 2004 - RNA, 22 nt, Homo sapiens
agacaucaagaucagucccaaa

SEQ ID NO: 2005 - RNA, 22 nt, Homo sapiens
acuucucauuuucugguuccuu

SEQ ID NO: 2006 - RNA, 22 nt, Homo sapiens
aauaagaccaucuuuuccucaa

SEQ ID NO: 2007 - RNA, 26 nt, Homo sapiens
cugagaaccagccauuucuuccucuu

SEQ ID NO: 2008 - RNA, 20 nt, Homo sapiens
cccaccugcucaguccgagc

SEQ ID NO: 2009 - RNA, 21 nt, Homo sapiens
agucuccaucugcggcccugu

SEQ ID NO: 2010 - RNA, 21 nt, Homo sapiens
acugaguccuuuguucucugc

SEQ ID NO: 2011 - RNA, 22 nt, Homo sapiens
ucagagaguuaagauaaucagu

SEQ ID NO: 2012 - RNA, 23 nt, Homo sapiens
acaaggcauaugguacucagaga

SEQ ID NO: 2013 - RNA, 22 nt, Homo sapiens
aaagagucaagucaaggccaga

SEQ ID NO: 2014 - RNA, 23 nt, Homo sapiens
ugcugugggaccucuggccuuga

SEQ ID NO: 2015 - RNA, 22 nt, Homo sapiens
cccuaauccaacauuacuaguu

SEQ ID NO: 2016 - RNA, 22 nt, Homo sapiens
aguagcagucacauauacauau

SEQ ID NO: 2017 - RNA, 21 nt, Homo sapiens
caagagaacuaaaacuggagu

SEQ ID NO: 2018 - RNA, 22 nt, Homo sapiens
aggcuccacuuucaguucucuu

SEQ ID NO: 2019 - RNA, 21 nt, Homo sapiens
ucucugccugcuuuuuggcca

SEQ ID NO: 2020 - RNA, 22 nt, Homo sapiens
augccuaucaaauaucuaccug

SEQ ID NO: 2021 - RNA, 21 nt, Homo sapiens
acaggcagauaugugauaggc

SEQ ID NO: 2022 - RNA, 22 nt, Homo sapiens
gccgaagcuccaagguuccucc

SEQ ID NO: 2023 - RNA, 23 nt, Homo sapiens
aguggucuacucacaucagccuc

SEQ ID NO: 2024 - RNA, 22 nt, Homo sapiens
ucccagcugugcaaccugagca

SEQ ID NO: 2025 - RNA, 22 nt, Homo sapiens
cugccucaguuuccacaccuga

SEQ ID NO: 2026 - RNA, 22 nt, Homo sapiens
guggcuggugcucguaucuaca

SEQ ID NO: 2027 - RNA, 22 nt, Homo sapiens
ugcaucugccauacaccccuua

SEQ ID NO: 2028 - RNA, 23 nt, Homo sapiens
cccccauugcuacagccgccugu

SEQ ID NO: 2029 - RNA, 22 nt, Homo sapiens
ccggguuaucuacaagggaauu

SEQ ID NO: 2030 - RNA, 22 nt, Homo sapiens
gacauccuguggucugcgcgua

SEQ ID NO: 2031 - RNA, 22 nt, Homo sapiens
aagugggcugggauccgggcug

SEQ ID NO: 2032 - RNA, 20 nt, Homo sapiens
cagagcccgccccaacccac

SEQ ID NO: 2033 - RNA, 22 nt, Homo sapiens
uaugauccucaguuguguguaa

SEQ ID NO: 2034 - RNA, 21 nt, Homo sapiens
auguaauacuguuaucugaaa

SEQ ID NO: 2035 - RNA, 22 nt, Homo sapiens
auuucagguaacaguauugcuu

SEQ ID NO: 2036 - RNA, 23 nt, Homo sapiens
cgccaagugaagccugggggcua

SEQ ID NO: 2037 - RNA, 23 nt, Homo sapiens
ccggagcagcaggccagcccgaa

SEQ ID NO: 2038 - RNA, 21 nt, Homo sapiens
ucucgguuggccugcugcaca

SEQ ID NO: 2039 - RNA, 23 nt, Homo sapiens
auaucaacccucuccuaugcccu

SEQ ID NO: 2040 - RNA, 20 nt, Homo sapiens
cccccgccuccgccgccgcc

SEQ ID NO: 2041 - RNA, 22 nt, Homo sapiens
ugcccuggaacggggcuggcag

SEQ ID NO: 2042 - RNA, 23 nt, Homo sapiens
cuaaggcuaaugcuguacuuugu

SEQ ID NO: 2043 - RNA, 23 nt, Homo sapiens
gcauuaaccuuacaaugaccuuu

SEQ ID NO: 2044 - RNA, 22 nt, Homo sapiens
gugaaguagugcauuagccuca

SEQ ID NO: 2045 - RNA, 24 nt, Homo sapiens
acauuaaucuuccugcucucuaua

SEQ ID NO: 2046 - RNA, 23 nt, Homo sapiens
uaagguuaauuacgaugaagcac

SEQ ID NO: 2047 - RNA, 24 nt, Homo sapiens
acacccuggaugcaugcuuuccac

SEQ ID NO: 2048 - RNA, 22 nt, Homo sapiens
agggguucaccgagcaacauuc

SEQ ID NO: 2049 - RNA, 23 nt, Homo sapiens
augcaaaguugcucggguaaccu

SEQ ID NO: 2050 - RNA, 21 nt, Homo sapiens
acaggccaucuguguuauauu

SEQ ID NO: 2051 - RNA, 22 nt, Homo sapiens
gguuaguggaccguguuacaua

SEQ ID NO: 2052 - RNA, 21 nt, Homo sapiens
cguacgcuauacggucuacua

SEQ ID NO: 2053 - RNA, 23 nt, Homo sapiens
acggcuaguggaccaggugaagu

SEQ ID NO: 2054 - RNA, 23 nt, Homo sapiens
gcgcccaauuaaugucuguugau

SEQ ID NO: 2055 - RNA, 22 nt, Homo sapiens
gccuucugacccuaaguccagu

SEQ ID NO: 2056 - RNA, 23 nt, Homo sapiens
acugaggggccucagaccgagcu

SEQ ID NO: 2057 - RNA, 23 nt, Homo sapiens
aaagucucgcucucugccccuca

SEQ ID NO: 2058 - RNA, 21 nt, Homo sapiens
auagcagcgccucacguuuug

SEQ ID NO: 2059 - RNA, 22 nt, Homo sapiens
uucaaaacaugaauugcugcug

SEQ ID NO: 2060 - RNA, 17 nt, Homo sapiens
uuggcccuuuucucagg

SEQ ID NO: 2061 - RNA, 19 nt, Homo sapiens
uggugcugacucaguggcc

SEQ ID NO: 2062 - RNA, 18 nt, Homo sapiens
acccccuggacaugcccu

SEQ ID NO: 2063 - RNA, 22 nt, Homo sapiens
gggcggacacgacauucccgau

SEQ ID NO: 2064 - RNA, 23 nt, Homo sapiens
gagaugguggaguagcuccaggc

SEQ ID NO: 2065 - RNA, 17 nt, Homo sapiens
uccaucucugaacacug

SEQ ID NO: 2066 - RNA, 23 nt, Homo sapiens
ucaacgggagugaucgugucauu

SEQ ID NO: 2067 - RNA, 18 nt, Homo sapiens
accuucaucaggucagau

SEQ ID NO: 2068 - RNA, 18 nt, Homo sapiens
cucaguccccaccucugg

SEQ ID NO: 2069 - RNA, 17 nt, Homo sapiens
ccaaggcgguggcgggg

SEQ ID NO: 2070 - RNA, 22 nt, Homo sapiens
uccugaccccuagacccaacug

SEQ ID NO: 2071 - RNA, 19 nt, Homo sapiens
ugggacuccaugccccaag

SEQ ID NO: 2072 - RNA, 16 nt, Homo sapiens
ugggucccuguuuccu

SEQ ID NO: 2073 - RNA, 17 nt, Homo sapiens
cagguagucugaauguc

SEQ ID NO: 2074 - RNA, 18 nt, Homo sapiens
ggccaaggcacuuagaau

SEQ ID NO: 2075 - RNA, 17 nt, Homo sapiens
aaugaccaugacugagu

SEQ ID NO: 2076 - RNA, 19 nt, Homo sapiens
cccagagcugagcccacag

SEQ ID NO: 2077 - RNA, 16 nt, Homo sapiens
ggccaaggccuccuag

SEQ ID NO: 2078 - RNA, 16 nt, Homo sapiens
gugccaccgagcugga

SEQ ID NO: 2079 - RNA, 21 nt, Homo sapiens
cacauccugagaggaggagcc

SEQ ID NO: 2080 - RNA, 21 nt, Homo sapiens
gccagggcugucugugccugc

SEQ ID NO: 2081 - RNA, 20 nt, Homo sapiens
gcccuccccugacucccuga

SEQ ID NO: 2082 - RNA, 19 nt, Homo sapiens
ccccaccuuuucuuccccc

SEQ ID NO: 2083 - RNA, 18 nt, Homo sapiens
acaaucacuaguugaaug

SEQ ID NO: 2084 - RNA, 18 nt, Homo sapiens
cuguccaucagagaacac

SEQ ID NO: 2085 - RNA, 18 nt, Homo sapiens
cagggggagggacugcug

SEQ ID NO: 2086 - RNA, 17 nt, Homo sapiens
aaagaagugguaauugg

SEQ ID NO: 2087 - RNA, 17 nt, Homo sapiens
gcacaugagucacugag

SEQ ID NO: 2088 - RNA, 21 nt, Homo sapiens
guguacugugcucagaacugc

SEQ ID NO: 2089 - RNA, 18 nt, Homo sapiens
caagggcaaacccccuag

SEQ ID NO: 2090 - RNA, 16 nt, Homo sapiens
gaagccgggaggagag

SEQ ID NO: 2091 - RNA, 21 nt, Homo sapiens
gcucugcucagaacuacacuc

SEQ ID NO: 2092 - RNA, 18 nt, Homo sapiens
ccccccuccccgggaccc

SEQ ID NO: 2093 - RNA, 18 nt, Homo sapiens
uccuggaugcaaauuuua

SEQ ID NO: 2094 - RNA, 17 nt, Homo sapiens
aaacucgcugagcccca

SEQ ID NO: 2095 - RNA, 18 nt, Homo sapiens
auggggugaugugagccc

SEQ ID NO: 2096 - RNA, 18 nt, Homo sapiens
augagucggacucgccgc

SEQ ID NO: 2097 - RNA, 17 nt, Homo sapiens
gguaccaggaguggggu

SEQ ID NO: 2098 - RNA, 19 nt, Homo sapiens
aaagugcccucaagggaga

SEQ ID NO: 2099 - RNA, 17 nt, Homo sapiens
ggaaacucagcagacaa

SEQ ID NO: 2100 - RNA, 19 nt, Homo sapiens
ugauagcccugcacaaugc

SEQ ID NO: 2101 - RNA, 22 nt, Homo sapiens
acgguuuuaccagacaguauua

SEQ ID NO: 2102 - RNA, 19 nt, Homo sapiens
gagggaagaaaggagggca

SEQ ID NO: 2103 - RNA, 16 nt, Homo sapiens
agcuguuccugcugaa

SEQ ID NO: 2104 - RNA, 18 nt, Homo sapiens
ccaaggccggcccagggg

SEQ ID NO: 2105 - RNA, 17 nt, Homo sapiens
cuguuccugucaggcug

SEQ ID NO: 2106 - RNA, 17 nt, Homo sapiens
cccugcuguagacuccc

SEQ ID NO: 2107 - RNA, 18 nt, Homo sapiens
aaggaaaacauugcacug

SEQ ID NO: 2108 - RNA, 17 nt, Homo sapiens
ugagccugagcccacau

SEQ ID NO: 2109 - RNA, 16 nt, Homo sapiens
cacagacaggaaggca

SEQ ID NO: 2110 - RNA, 22 nt, Homo sapiens
cugccuccuccuccugucccag

SEQ ID NO: 2111 - RNA, 18 nt, Homo sapiens
gccucucaugucaccagc

SEQ ID NO: 2112 - RNA, 18 nt, Homo sapiens
gaaguaguccagcuccca

SEQ ID NO: 2113 - RNA, 20 nt, Homo sapiens
ucacaagugaaguaguggga

SEQ ID NO: 2114 - RNA, 18 nt, Homo sapiens
cucgcugagccacacugg

SEQ ID NO: 2115 - RNA, 17 nt, Homo sapiens
cuguccucagcucagaa

SEQ ID NO: 2116 - RNA, 17 nt, Homo sapiens
ugcccuggacaugccgg

SEQ ID NO: 2117 - RNA, 18 nt, Homo sapiens
gaacuggaggugucuagg

SEQ ID NO: 2118 - RNA, 17 nt, Homo sapiens
uacugccuuucucucca

SEQ ID NO: 2119 - RNA, 19 nt, Homo sapiens
ggaaacaggaaaaaacauu

SEQ ID NO: 2120 - RNA, 18 nt, Homo sapiens
aagaagaaacuccaggga

SEQ ID NO: 2121 - RNA, 18 nt, Homo sapiens
uggaauccuagacuccag

SEQ ID NO: 2122 - RNA, 16 nt, Homo sapiens
gggacaugaaugcugc

SEQ ID NO: 2123 - RNA, 18 nt, Homo sapiens
cacacucagcucucuuuc

SEQ ID NO: 2124 - RNA, 19 nt, Homo sapiens
uggggacaggaacaaggcc

SEQ ID NO: 2125 - RNA, 20 nt, Homo sapiens
ggguuuggggccagggggcu

SEQ ID NO: 2126 - RNA, 22 nt, Homo sapiens
agaagcccugcaagacgaccug

SEQ ID NO: 2127 - RNA, 18 nt, Homo sapiens
cugucccauuucccagag

SEQ ID NO: 2128 - RNA, 18 nt, Homo sapiens
guccagcucagaaagcgg

SEQ ID NO: 2129 - RNA, 21 nt, Homo sapiens
ugcaugacggccugcaagaca

SEQ ID NO: 2130 - RNA, 17 nt, Homo sapiens
caccagcuagccucacc

SEQ ID NO: 2131 - RNA, 17 nt, Homo sapiens
aaacucccuggcaaugu

SEQ ID NO: 2132 - RNA, 17 nt, Homo sapiens
agcauguacccacagug

SEQ ID NO: 2133 - RNA, 17 nt, Homo sapiens
guggcuuugcucaggga

SEQ ID NO: 2134 - RNA, 18 nt, Homo sapiens
aggaagcuacagaauccc

SEQ ID NO: 2135 - RNA, 21 nt, Homo sapiens
cgcagggcgguccaccgcuaa

SEQ ID NO: 2136 - RNA, 21 nt, Homo sapiens
ccccacgcgcugagcccacag

SEQ ID NO: 2137 - RNA, 18 nt, Homo sapiens
ucugaggcuguggggcug

SEQ ID NO: 2138 - RNA, 21 nt, Homo sapiens
agacauggaggagccauccag

SEQ ID NO: 2139 - RNA, 20 nt, Homo sapiens
uuaagguuagggucucaggg

SEQ ID NO: 2140 - RNA, 18 nt, Homo sapiens
ucacugagacaagugcaa

SEQ ID NO: 2141 - RNA, 23 nt, Homo sapiens
ccacccaaugaccuacuccaaga

SEQ ID NO: 2142 - RNA, 20 nt, Homo sapiens
gucugggagacagaggaaca

SEQ ID NO: 2143 - RNA, 19 nt, Homo sapiens
ccagucccccaugcaagcc

SEQ ID NO: 2144 - RNA, 17 nt, Homo sapiens
aauccugggaaaacugg

SEQ ID NO: 2145 - RNA, 19 nt, Homo sapiens
guggaacuagggucucagg

SEQ ID NO: 2146 - RNA, 22 nt, Homo sapiens
acaccgaggagcccaucaugau

SEQ ID NO: 2147 - RNA, 19 nt, Homo sapiens
gcaaggcucugaucugagg

SEQ ID NO: 2148 - RNA, 18 nt, Homo sapiens
cccuccgggaagcccacc

SEQ ID NO: 2149 - RNA, 18 nt, Homo sapiens
cugcugaguccugcagug

SEQ ID NO: 2150 - RNA, 17 nt, Homo sapiens
ugcagucuccucccuca

SEQ ID NO: 2151 - RNA, 18 nt, Homo sapiens
ccaucuuccuucagccuc

SEQ ID NO: 2152 - RNA, 22 nt, Homo sapiens
cucagcuacagacaucagugac

SEQ ID NO: 2153 - RNA, 22 nt, Homo sapiens
uagcuccuuuccacagacaggu

SEQ ID NO: 2154 - RNA, 21 nt, Homo sapiens
uggguacuuccugaugcuuuu

SEQ ID NO: 2155 - RNA, 21 nt, Homo sapiens
uuguugcuuuuuggugccuau

SEQ ID NO: 2156 - RNA, 22 nt, Homo sapiens
gcaugggaacaaaaaggcaacu

SEQ ID NO: 2157 - RNA, 22 nt, Homo sapiens
uaguccauuuugaguuaacucu

SEQ ID NO: 2158 - RNA, 22 nt, Homo sapiens
augguccugcugaaucccaaca

SEQ ID NO: 2159 - RNA, 17 nt, Homo sapiens
aaaguacguccaucuuc

SEQ ID NO: 2160 - RNA, 21 nt, Homo sapiens
acucuucagacucuauucaga

SEQ ID NO: 2161 - RNA, 22 nt, Homo sapiens
gcuccauguucccgucuccuug

SEQ ID NO: 2162 - RNA, 20 nt, Homo sapiens
cgccucucagcccagcuuuu

SEQ ID NO: 2163 - RNA, 18 nt, Homo sapiens
cuccgcucacuccagccu

SEQ ID NO: 2164 - RNA, 22 nt, Homo sapiens
accuucuaguuuucagagucgc

SEQ ID NO: 2165 - RNA, 20 nt, Homo sapiens
aggcaucuugcagagucuuu

SEQ ID NO: 2166 - RNA, 21 nt, Homo sapiens
augucccacccccacuccugu

SEQ ID NO: 2167 - RNA, 21 nt, Homo sapiens
acaggaguggggggugggacg

SEQ ID NO: 2168 - RNA, 18 nt, Homo sapiens
uucuacuuuacuucuccu

SEQ ID NO: 2169 - RNA, 22 nt, Homo sapiens
ccucugugugagcucuggccau

SEQ ID NO: 2170 - RNA, 21 nt, Homo sapiens
auccacuucugccuguccugc

SEQ ID NO: 2171 - RNA, 22 nt, Homo sapiens
uuguccacuucuuccugcccug

SEQ ID NO: 2172 - RNA, 22 nt, Homo sapiens
ggcagggcaggcagaaguggac

SEQ ID NO: 2173 - RNA, 21 nt, Homo sapiens
aaccuuuguacccugagccca

SEQ ID NO: 2174 - RNA, 21 nt, Homo sapiens
acugucuuuucuaagccugug

SEQ ID NO: 2175 - RNA, 22 nt, Homo sapiens
augccuccaagguaucagucac

SEQ ID NO: 2176 - RNA, 22 nt, Homo sapiens
caagccagcaagccccacgaca

SEQ ID NO: 2177 - RNA, 17 nt, Homo sapiens
uacaaucuccucccugu

SEQ ID NO: 2178 - RNA, 17 nt, Homo sapiens
ccucccucuuguccggc

SEQ ID NO: 2179 - RNA, 17 nt, Homo sapiens
aaaacccacgccuccaa

SEQ ID NO: 2180 - RNA, 18 nt, Homo sapiens
cgccucuuccaacucgag

SEQ ID NO: 2181 - RNA, 21 nt, Homo sapiens
uggauuguuucuuuugccgug

SEQ ID NO: 2182 - RNA, 22 nt, Homo sapiens
ugcacggcaaaagaaacaaucu

SEQ ID NO: 2183 - RNA, 22 nt, Homo sapiens
acccaugucacugccagcccug

SEQ ID NO: 2184 - RNA, 22 nt, Homo sapiens
gccaagggaauggcagggaaau

SEQ ID NO: 2185 - RNA, 17 nt, Homo sapiens
aaacaacagcccccacc

SEQ ID NO: 2186 - RNA, 20 nt, Homo sapiens
uaccccuagaccaaggagcc

SEQ ID NO: 2187 - RNA, 22 nt, Homo sapiens
ugccucgcgcagccccgggacg

SEQ ID NO: 2188 - RNA, 22 nt, Homo sapiens
ucaccacuucuccaaaucccca

SEQ ID NO: 2189 - RNA, 17 nt, Homo sapiens
uguccucagcucuacca

SEQ ID NO: 2190 - RNA, 23 nt, Homo sapiens
aucacuuaaggccaagaauucaa

SEQ ID NO: 2191 - RNA, 20 nt, Homo sapiens
aaccgcuacagaccaagcuc

SEQ ID NO: 2192 - RNA, 20 nt, Homo sapiens
uggugccgugacucggaucc

SEQ ID NO: 2193 - RNA, 17 nt, Homo sapiens
aaaaacacacacacccu

SEQ ID NO: 2194 - RNA, 17 nt, Homo sapiens
aaaaggaagccaccagg

SEQ ID NO: 2195 - RNA, 22 nt, Homo sapiens
uacgccagucaauaccuuguga

SEQ ID NO: 2196 - RNA, 19 nt, Homo sapiens
uucuuccacaccuaccucu

SEQ ID NO: 2197 - RNA, 22 nt, Homo sapiens
cuccaccuccuccgccuccugg

SEQ ID NO: 2198 - RNA, 22 nt, Homo sapiens
aagguaaauucacaaccacuau

SEQ ID NO: 2199 - RNA, 23 nt, Homo sapiens
gccuagcccuacuagucucaauc

SEQ ID NO: 2200 - RNA, 23 nt, Homo sapiens
uucccaagccacccuccguguca

SEQ ID NO: 2201 - RNA, 17 nt, Homo sapiens
ggccccaccccagucuc

SEQ ID NO: 2202 - RNA, 21 nt, Homo sapiens
uauugcaucuauccaaaccuu

SEQ ID NO: 2203 - RNA, 22 nt, Homo sapiens
uccccuggucagacuacuugag

SEQ ID NO: 2204 - RNA, 18 nt, Homo sapiens
ccccgccggcccgcaccc

SEQ ID NO: 2205 - RNA, 22 nt, Homo sapiens
aagcccauaacuaccgccgcca

SEQ ID NO: 2206 - RNA, 18 nt, Homo sapiens
aucucauccuucugcucu

SEQ ID NO: 2207 - RNA, 22 nt, Homo sapiens
uccgagcgacccuagagggagc

SEQ ID NO: 2208 - RNA, 21 nt, Homo sapiens
ucucggcuuccacguuugcca

SEQ ID NO: 2209 - RNA, 22 nt, Homo sapiens
ugggaacuuaguagagguuuaa

SEQ ID NO: 2210 - RNA, 18 nt, Homo sapiens
ggugggggguguuguuuu

SEQ ID NO: 2211 - RNA, 22 nt, Homo sapiens
cuagugcucuccguuacaagua

SEQ ID NO: 2212 - RNA, 22 nt, Homo sapiens
uuguggcuggucaugaggcuaa

SEQ ID NO: 2213 - RNA, 21 nt, Homo sapiens
uuagucucaugaucagacaca

SEQ ID NO: 2214 - RNA, 22 nt, Homo sapiens
caagggaccaagcauucauuau

SEQ ID NO: 2215 - RNA, 22 nt, Homo sapiens
caggaaggauuuagggacaggc

SEQ ID NO: 2216 - RNA, 22 nt, Homo sapiens
cuauuaaggacauuugugauuc

SEQ ID NO: 2217 - RNA, 22 nt, Homo sapiens
auuaaggacauuugugauugau

SEQ ID NO: 2218 - RNA, 17 nt, Homo sapiens
gaggcugagcugaggag

SEQ ID NO: 2219 - RNA, 22 nt, Homo sapiens
cgcgcggccgugcucggagcag

SEQ ID NO: 2220 - RNA, 22 nt, Homo sapiens
uugcauauguaggaugucccau

SEQ ID NO: 2221 - RNA, 21 nt, Homo sapiens
agccaaguggaaguuacuuua

SEQ ID NO: 2222 - RNA, 17 nt, Homo sapiens
ggagugggcuggugguu

SEQ ID NO: 2223 - RNA, 22 nt, Homo sapiens
uuucuauuucucaguggggcuc

SEQ ID NO: 2224 - RNA, 22 nt, Homo sapiens
aacccagugggcuauggaaaug

SEQ ID NO: 2225 - RNA, 17 nt, Homo sapiens
gggguggucuguuguug

SEQ ID NO: 2226 - RNA, 20 nt, Homo sapiens
aaaaggcgggagaagcccca

SEQ ID NO: 2227 - RNA, 20 nt, Homo sapiens
uaacggccgcgguacccuaa

SEQ ID NO: 2228 - RNA, 17 nt, Homo sapiens
gcugggcgaggcuggca

SEQ ID NO: 2229 - RNA, 19 nt, Homo sapiens
agagcuggcugaagggcag

SEQ ID NO: 2230 - RNA, 18 nt, Homo sapiens
agggggcgggcuccggcg

SEQ ID NO: 2231 - RNA, 21 nt, Homo sapiens
uggggcuagugaugcaggacg

SEQ ID NO: 2232 - RNA, 22 nt, Homo sapiens
ucugguaagagauuugggcaua

SEQ ID NO: 2233 - RNA, 22 nt, Homo sapiens
aauguggacuggugugaccaaa

SEQ ID NO: 2234 - RNA, 17 nt, Homo sapiens
ggggcugggcgcgcgcc

SEQ ID NO: 2235 - RNA, 21 nt, Homo sapiens
agaaggccuuuccaucucugu

SEQ ID NO: 2236 - RNA, 22 nt, Homo sapiens
ccagacuguggcugaccagagg

SEQ ID NO: 2237 - RNA, 21 nt, Homo sapiens
aauguaaacaggcuuuuugcu

SEQ ID NO: 2238 - RNA, 22 nt, Homo sapiens
gaggaaacugaagcugagaggg

SEQ ID NO: 2239 - RNA, 17 nt, Homo sapiens
cuccgggacggcugggc

SEQ ID NO: 2240 - RNA, 22 nt, Homo sapiens
ugggcuggcagggcaagugcug

SEQ ID NO: 2241 - RNA, 17 nt, Homo sapiens
aagacugagaggaggga

SEQ ID NO: 2242 - RNA, 22 nt, Homo sapiens
uggcaguguauuguuagcuggu

SEQ ID NO: 2243 - RNA, 22 nt, Homo sapiens
cagccacaacuacccugccacu

SEQ ID NO: 2244 - RNA, 22 nt, Homo sapiens
aggcaguguauuguuagcuggc

SEQ ID NO: 2245 - RNA, 23 nt, Homo sapiens
uugcuaguugcacuccucucugu

SEQ ID NO: 2246 - RNA, 25 nt, Homo sapiens
uaggcaguguauugcuagcggcugu

SEQ ID NO: 2247 - RNA, 17 nt, Homo sapiens
ugagguaguaguuucuu

SEQ ID NO: 2248 - RNA, 21 nt, Homo sapiens
uaugugaccucggaugaauca

SEQ ID NO: 2249 - RNA, 22 nt, Homo sapiens
gcugaugaugauggugcugaag

SEQ ID NO: 2250 - RNA, 22 nt, Homo sapiens
uuuaagcaggaaauagaauuua

SEQ ID NO: 2251 - RNA, 22 nt, Homo sapiens
ugugacaauagagaugaacaug

SEQ ID NO: 2252 - RNA, 18 nt, Homo sapiens
aggcugggcugggacgga

SEQ ID NO: 2253 - RNA, 20 nt, Homo sapiens
aaauggguggucugaggcaa

SEQ ID NO: 2254 - RNA, 20 nt, Homo sapiens
cuggguugggcugggcuggg

SEQ ID NO: 2255 - RNA, 17 nt, Homo sapiens
gcggggcugggcgcgcg

SEQ ID NO: 2256 - RNA, 22 nt, Homo sapiens
acuaaaggauauagaagguuuu

SEQ ID NO: 2257 - RNA, 22 nt, Homo sapiens
auuggggacauuuugcauucau

SEQ ID NO: 2258 - RNA, 22 nt, Homo sapiens
uuuugcgauguguuccuaauau

SEQ ID NO: 2259 - RNA, 22 nt, Homo sapiens
uugggaucauuuugcauccaua

SEQ ID NO: 2260 - RNA, 22 nt, Homo sapiens
uuuugcaauauguuccugaaua

SEQ ID NO: 2261 - RNA, 22 nt, Homo sapiens
ugagggaguaggauguaugguu

SEQ ID NO: 2262 - RNA, 22 nt, Homo sapiens
gaagaacuguugcauuugcccu

SEQ ID NO: 2263 - RNA, 22 nt, Homo sapiens
cagggccucacuguaucgccca

SEQ ID NO: 2264 - RNA, 22 nt, Homo sapiens
agacugacggcuggaggcccau

SEQ ID NO: 2265 - RNA, 18 nt, Homo sapiens
acaggcaggauuggggaa

SEQ ID NO: 2266 - RNA, 22 nt, Homo sapiens
aggacuggacucccggcagccc

SEQ ID NO: 2267 - RNA, 17 nt, Homo sapiens
gggagaagggucggggc

SEQ ID NO: 2268 - RNA, 25 nt, Homo sapiens
aaauaugaugaaacucacagcugag

SEQ ID NO: 2269 - RNA, 26 nt, Homo sapiens
gcucagggaugauaacugugcugaga

SEQ ID NO: 2270 - RNA, 18 nt, Homo sapiens
cagcagugcgcagggcug

SEQ ID NO: 2271 - RNA, 22 nt, Homo sapiens
aaaccguuaccauuacugaguu

SEQ ID NO: 2272 - RNA, 22 nt, Homo sapiens
uagcaagagaaccauuaccauu

SEQ ID NO: 2273 - RNA, 22 nt, Homo sapiens
uuggacagaaaacacgcaggaa

SEQ ID NO: 2274 - RNA, 20 nt, Homo sapiens
ccugcguguuuucuguccaa

SEQ ID NO: 2275 - RNA, 22 nt, Homo sapiens
uuuggacagaaaacacgcaggu

SEQ ID NO: 2276 - RNA, 20 nt, Homo sapiens
ccugcguguuuucuguccaa

SEQ ID NO: 2277 - RNA, 22 nt, Homo sapiens
gcuaaggaaguccugugcucag

SEQ ID NO: 2278 - RNA, 21 nt, Homo sapiens
ugacucugccuguaggccggu

SEQ ID NO: 2279 - RNA, 21 nt, Homo sapiens
gaccgagagggccucggcugu

SEQ ID NO: 2280 - RNA, 22 nt, Homo sapiens
cucaucugcaaagaaguaagug

SEQ ID NO: 2281 - RNA, 22 nt, Homo sapiens
ugagacaggcuuaugcugcuau

SEQ ID NO: 2282 - RNA, 22 nt, Homo sapiens
auagcagcaugaaccugucuca

SEQ ID NO: 2283 - RNA, 20 nt, Homo sapiens
gagacagguucaugcugcua

SEQ ID NO: 2284 - RNA, 21 nt, Homo sapiens
auagcagcauaagccugucuc

SEQ ID NO: 2285 - RNA, 21 nt, Homo sapiens
ggggggaugugcaugcugguu

SEQ ID NO: 2286 - RNA, 22 nt, Homo sapiens
aacuguuugcagaggaaacuga

SEQ ID NO: 2287 - RNA, 22 nt, Homo sapiens
gcugacagcagggcuggccgcu

SEQ ID NO: 2288 - RNA, 22 nt, Homo sapiens
uggucugcaaagagaugacugu

SEQ ID NO: 2289 - RNA, 22 nt, Homo sapiens
ucauuauauguaugaucuggac

SEQ ID NO: 2290 - RNA, 21 nt, Homo sapiens
auuggacugcugauggcccgu

SEQ ID NO: 2291 - RNA, 22 nt, Homo sapiens
aggccaucagcaguccaaugaa

SEQ ID NO: 2292 - RNA, 18 nt, Homo sapiens
cccagcaggacgggagcg

SEQ ID NO: 2293 - RNA, 17 nt, Homo sapiens
auggagaaggcuucuga

SEQ ID NO: 2294 - RNA, 17 nt, Homo sapiens
ccccggggagcccggcg

SEQ ID NO: 2295 - RNA, 22 nt, Homo sapiens
uggaaggagguugccggacgcu

SEQ ID NO: 2296 - RNA, 17 nt, Homo sapiens
ggauggaggaggggucu

SEQ ID NO: 2297 - RNA, 17 nt, Homo sapiens
guggaccuggcugggac

SEQ ID NO: 2298 - RNA, 21 nt, Homo sapiens
ucgugcauauaucuaccacau

SEQ ID NO: 2299 - RNA, 21 nt, Homo sapiens
ugugguagauauaugcacgau

SEQ ID NO: 2300 - RNA, 22 nt, Homo sapiens
ugagccgagcugagcuuagcug

SEQ ID NO: 2301 - RNA, 22 nt, Homo sapiens
gagcuuggaugagcugggcuga

SEQ ID NO: 2302 - RNA, 22 nt, Homo sapiens
gcugaacugggcugagcugggc

SEQ ID NO: 2303 - RNA, 21 nt, Homo sapiens
uuaguccugccuguagguuua

SEQ ID NO: 2304 - RNA, 23 nt, Homo sapiens
uagugcaauauugcuuauagggu

SEQ ID NO: 2305 - RNA, 22 nt, Homo sapiens
acccuaucaauauugucucugc

SEQ ID NO: 2306 - RNA, 21 nt, Homo sapiens
gcaguccaugggcauauacac

SEQ ID NO: 2307 - RNA, 22 nt, Homo sapiens
uaugugccuuuggacuacaucg

SEQ ID NO: 2308 - RNA, 22 nt, Homo sapiens
ugccgcccucucgcugcucuag

SEQ ID NO: 2309 - RNA, 23 nt, Homo sapiens
gagggcagcguggguguggcgga

SEQ ID NO: 2310 - RNA, 22 nt, Homo sapiens
aggagcuagccaggcauaugca

SEQ ID NO: 2311 - RNA, 20 nt, Homo sapiens
auaugccuggcuagcuccuc

SEQ ID NO: 2312 - RNA, 19 nt, Homo sapiens
cggcgcgaccggcccgggg

SEQ ID NO: 2313 - RNA, 21 nt, Homo sapiens
ucuugaagucagaacccgcaa

SEQ ID NO: 2314 - RNA, 22 nt, Homo sapiens
aacucguguucaaagccuuuag

SEQ ID NO: 2315 - RNA, 22 nt, Homo sapiens
uacuaacugcagauucaaguga

SEQ ID NO: 2316 - RNA, 23 nt, Homo sapiens
ccuggacaccgcucagccggccg

SEQ ID NO: 2317 - RNA, 21 nt, Homo sapiens
acucggcugcgguggacaagu

SEQ ID NO: 2318 - RNA, 20 nt, Homo sapiens
ucacucucaccuugcuuugc

SEQ ID NO: 2319 - RNA, 22 nt, Homo sapiens
uugcuaaguaggcugagauuga

SEQ ID NO: 2320 - RNA, 22 nt, Homo sapiens
cacccccuguuuccuggcccac

SEQ ID NO: 2321 - RNA, 23 nt, Homo sapiens
ugggccagggagcagcugguggg

SEQ ID NO: 2322 - RNA, 24 nt, Homo sapiens
ugcccaugccauacuuuugccuca

SEQ ID NO: 2323 - RNA, 22 nt, Homo sapiens
auggcaucguccccugguggcu

SEQ ID NO: 2324 - RNA, 22 nt, Homo sapiens
gacacaugaccauaaaugcuaa

SEQ ID NO: 2325 - RNA, 23 nt, Homo sapiens
uggagagagaaaagagacagaag

SEQ ID NO: 2326 - RNA, 22 nt, Homo sapiens
agacaguaguucuugccugguu

SEQ ID NO: 2327 - RNA, 19 nt, Homo sapiens
accaggcaagaaauauugu

SEQ ID NO: 2328 - RNA, 21 nt, Homo sapiens
auugucccucucccuucccag

SEQ ID NO: 2329 - RNA, 22 nt, Homo sapiens
acugggaagaggagcugaggga

SEQ ID NO: 2330 - RNA, 23 nt, Homo sapiens
gaagauggugcugugcugaggaa

SEQ ID NO: 2331 - RNA, 20 nt, Homo sapiens
ugugggacugcaaaugggag

SEQ ID NO: 2332 - RNA, 21 nt, Homo sapiens
ucugaggccugccucucccca

SEQ ID NO: 2333 - RNA, 24 nt, Homo sapiens
ugggcgaggggugggcucucagag

SEQ ID NO: 2334 - RNA, 21 nt, Homo sapiens
agguagaaugaggccugacau

SEQ ID NO: 2335 - RNA, 19 nt, Homo sapiens
ucaggccucuuucuaccuu

SEQ ID NO: 2336 - RNA, 20 nt, Homo sapiens
cggggugggugaggucgggc

SEQ ID NO: 2337 - RNA, 22 nt, Homo sapiens
guucuguuaacccauccccuca

SEQ ID NO: 2338 - RNA, 22 nt, Homo sapiens
aggggacugguuaauagaacua

SEQ ID NO: 2339 - RNA, 23 nt, Homo sapiens
uggaguuaaggguugcuuggaga

SEQ ID NO: 2340 - RNA, 22 nt, Homo sapiens
ucucugagcaaggcuuaacacc

SEQ ID NO: 2341 - RNA, 22 nt, Homo sapiens
ugugggaucuggaggcaucugg

SEQ ID NO: 2342 - RNA, 21 nt, Homo sapiens
acccucgucagguccccgggg

SEQ ID NO: 2343 - RNA, 22 nt, Homo sapiens
caccggggauggcagagggucg

SEQ ID NO: 2344 - RNA, 23 nt, Homo sapiens
ugggcugagggcaggaggccugu

SEQ ID NO: 2345 - RNA, 23 nt, Homo sapiens
aauguggaaguggucugaggcau

SEQ ID NO: 2346 - RNA, 23 nt, Homo sapiens
gugaguguggauccuggaggaau

SEQ ID NO: 2347 - RNA, 22 nt, Homo sapiens
uuucuucuuagacauggcaacg

SEQ ID NO: 2348 - RNA, 22 nt, Homo sapiens
cugccaugucuaagaagaaaac

SEQ ID NO: 2349 - RNA, 22 nt, Homo sapiens
uuucuucuuagacauggcagcu

SEQ ID NO: 2350 - RNA, 19 nt, Homo sapiens
uugccaugucuaagaagaa

SEQ ID NO: 2351 - RNA, 23 nt, Homo sapiens
auacacauacacgcaacacacau

SEQ ID NO: 2352 - RNA, 23 nt, Homo sapiens
ugcagcucugguggaaaauggag

SEQ ID NO: 2353 - RNA, 22 nt, Homo sapiens
caggauccacagagcuagucca

SEQ ID NO: 2354 - RNA, 22 nt, Homo sapiens
aacuagcucuguggauccugac

SEQ ID NO: 2355 - RNA, 22 nt, Homo sapiens
aaagauagacaauuggcuaaau

SEQ ID NO: 2356 - RNA, 22 nt, Homo sapiens
uuagccaauuguccaucuuuag

SEQ ID NO: 2357 - RNA, 22 nt, Homo sapiens
aaagauggacaauuggcuaaau

SEQ ID NO: 2358 - RNA, 24 nt, Homo sapiens
agcugagcuccauggacgugcagu

SEQ ID NO: 2359 - RNA, 22 nt, Homo sapiens
cuuccggucugugagccccguc

SEQ ID NO: 2360 - RNA, 22 nt, Homo sapiens
uggggugcccacuccgcaaguu

SEQ ID NO: 2361 - RNA, 26 nt, Homo sapiens
cucggccgcggcgcguagcccccgcc

SEQ ID NO: 2362 - RNA, 23 nt, Homo sapiens
cugggggacgcgugagcgcgagc

SEQ ID NO: 2363 - RNA, 21 nt, Homo sapiens
cauacaaucugacauguauuu

SEQ ID NO: 2364 - RNA, 21 nt, Homo sapiens
auacaugucagauuguaugcc

SEQ ID NO: 2365 - RNA, 23 nt, Homo sapiens
uugcaugucagauuguaauuccc

SEQ ID NO: 2366 - RNA, 21 nt, Homo sapiens
ucccuccuucuguccccacag

SEQ ID NO: 2367 - RNA, 22 nt, Homo sapiens
acuggggagcagaaggagaacc

SEQ ID NO: 2368 - RNA, 23 nt, Homo sapiens
gaaaauccuuuuuguuuuuccag

SEQ ID NO: 2369 - RNA, 23 nt, Homo sapiens
agggaaaaaaaaaaggauuuguc

SEQ ID NO: 2370 - RNA, 22 nt, Homo sapiens
uguguccgggaaguggaggagg

SEQ ID NO: 2371 - RNA, 22 nt, Homo sapiens
ugaaguuacaucauggucgcuu

SEQ ID NO: 2372 - RNA, 22 nt, Homo sapiens
aagcgaccaugauguaacuuca

SEQ ID NO: 2373 - RNA, 21 nt, Homo sapiens
uuagugcauagucuuuggucu

SEQ ID NO: 2374 - RNA, 22 nt, Homo sapiens
accgaagacugugcgcuaaucu

SEQ ID NO: 2375 - RNA, 21 nt, Homo sapiens
uuacacagcuggacagaggca

SEQ ID NO: 2376 - RNA, 22 nt, Homo sapiens
uccaggcaggagccggacugga

SEQ ID NO: 2377 - RNA, 21 nt, Homo sapiens
cugggcucgggacgcgcggcu

SEQ ID NO: 2378 - RNA, 22 nt, Homo sapiens
ggggcugugauugaccagcagg

SEQ ID NO: 2379 - RNA, 22 nt, Homo sapiens
cacuguuucaccacuggcucuu

SEQ ID NO: 2380 - RNA, 21 nt, Homo sapiens
gagccaguggugagacaguga

SEQ ID NO: 2381 - RNA, 22 nt, Homo sapiens
ucugugagaccaaagaacuacu

SEQ ID NO: 2382 - RNA, 22 nt, Homo sapiens
uuguucuuuggucuuucagcca

SEQ ID NO: 2383 - RNA, 22 nt, Homo sapiens
aagguauuguucagacuuauga

SEQ ID NO: 2384 - RNA, 22 nt, Homo sapiens
ucugugauagagauucuuugcu

SEQ ID NO: 2385 - RNA, 21 nt, Homo sapiens
ucugaauuguaagaguuguua

SEQ ID NO: 2386 - RNA, 23 nt, Homo sapiens
agaacucuugcagucuuagaugu

SEQ ID NO: 2387 - RNA, 22 nt, Homo sapiens
aacgggaaugcaggcuguaucu

SEQ ID NO: 2388 - RNA, 23 nt, Homo sapiens
ucugaguuccuggagccuggucu

SEQ ID NO: 2389 - RNA, 23 nt, Homo sapiens
uggagauccagugcucgcccgau

SEQ ID NO: 2390 - RNA, 22 nt, Homo sapiens
uguugcaagucgguggagacgu

SEQ ID NO: 2391 - RNA, 22 nt, Homo sapiens
cucucuacugacuugcaacaua

SEQ ID NO: 2392 - RNA, 22 nt, Homo sapiens
ucucccuuccugcccuggcuag

SEQ ID NO: 2393 - RNA, 26 nt, Homo sapiens
cccagggcuuggaguggggcaagguu

SEQ ID NO: 2394 - RNA, 23 nt, Homo sapiens
uaucugcugggcuuucugguguu

SEQ ID NO: 2395 - RNA, 21 nt, Homo sapiens
uggcuguuggagggggcaggc

SEQ ID NO: 2396 - RNA, 22 nt, Homo sapiens
cagcccuccucccgcacccaaa

SEQ ID NO: 2397 - RNA, 22 nt, Homo sapiens
uaggggcagcagaggaccuggg

SEQ ID NO: 2398 - RNA, 22 nt, Homo sapiens
uugaggagacauggugggggcc

SEQ ID NO: 2399 - RNA, 21 nt, Homo sapiens
gcagcccagcugaggccucug

SEQ ID NO: 2400 - RNA, 22 nt, Homo sapiens
gagcaggcgaggcugggcugaa

SEQ ID NO: 2401 - RNA, 23 nt, Homo sapiens
ccagccacggacugagagugcau

SEQ ID NO: 2402 - RNA, 23 nt, Homo sapiens
guccuccaggccaugagcugcgg

SEQ ID NO: 2403 - RNA, 22 nt, Homo sapiens
ucaggcaguguggguaucagau

SEQ ID NO: 2404 - RNA, 23 nt, Homo sapiens
ugagaguggaauucacaguauuu

SEQ ID NO: 2405 - RNA, 23 nt, Homo sapiens
auacugugaauuucacugucaca

SEQ ID NO: 2406 - RNA, 21 nt, Homo sapiens
caaauggacaggauaacaccu

SEQ ID NO: 2407 - RNA, 22 nt, Homo sapiens
agguguuauccuauccauuugc

SEQ ID NO: 2408 - RNA, 22 nt, Homo sapiens
ugaucucaccgcugccuccuuc

SEQ ID NO: 2409 - RNA, 22 nt, Homo sapiens
caggaggcagugggcgagcagg

SEQ ID NO: 2410 - RNA, 22 nt, Homo sapiens
ugcaagacggauacugucaucu

SEQ ID NO: 2411 - RNA, 24 nt, Homo sapiens
ugucagugacuccugccccuuggu

SEQ ID NO: 2412 - RNA, 22 nt, Homo sapiens
agggggcgcagucacugacgug

SEQ ID NO: 2413 - RNA, 23 nt, Homo sapiens
ucaaaauguagaggaagacccca

SEQ ID NO: 2414 - RNA, 22 nt, Homo sapiens
aauuuacucugcaaucuucucc

SEQ ID NO: 2415 - RNA, 22 nt, Homo sapiens
agaagauugcagaguaaguucc

SEQ ID NO: 2416 - RNA, 26 nt, Homo sapiens
cacaggacugacuccucaccccagug

SEQ ID NO: 2417 - RNA, 22 nt, Homo sapiens
ucuggggaugaggacagugugu

SEQ ID NO: 2418 - RNA, 20 nt, Homo sapiens
augggugauggguguggugu

SEQ ID NO: 2419 - RNA, 22 nt, Homo sapiens
uuggccaccacaccuaccccuu

SEQ ID NO: 2420 - RNA, 22 nt, Homo sapiens
uguaguuguauuguauugccac

SEQ ID NO: 2421 - RNA, 23 nt, Homo sapiens
uagcaauacaguacaaauauagu

SEQ ID NO: 2422 - RNA, 22 nt, Homo sapiens
ucagucacauaucuagugucua

SEQ ID NO: 2423 - RNA, 22 nt, Homo sapiens
gacacuaggcaugugagugauu

SEQ ID NO: 2424 - RNA, 22 nt, Homo sapiens
ucaaucacuugguaauugcugu

SEQ ID NO: 2425 - RNA, 25 nt, Homo sapiens
agcggggaggaagugggcgcugcuu

SEQ ID NO: 2426 - RNA, 22 nt, Homo sapiens
agcccgccccagccgagguucu

SEQ ID NO: 2427 - RNA, 23 nt, Homo sapiens
gccccggcgcgggcggguucugg

SEQ ID NO: 2428 - RNA, 22 nt, Homo sapiens
agcaaggcggcaucucucugau

SEQ ID NO: 2429 - RNA, 21 nt, Homo sapiens
agagaugccgccuugcuccuu

SEQ ID NO: 2430 - RNA, 23 nt, Homo sapiens
uugaagaggaggugcucuguagc

SEQ ID NO: 2431 - RNA, 22 nt, Homo sapiens
acaacagugacuugcucuccaa

SEQ ID NO: 2432 - RNA, 18 nt, Homo sapiens
gggugagggcaggugguu

SEQ ID NO: 2433 - RNA, 18 nt, Homo sapiens
cgugucuucuggcuugau

SEQ ID NO: 2434 - RNA, 23 nt, Homo sapiens
ugcaucaggccagaagacaugag

SEQ ID NO: 2435 - RNA, 21 nt, Homo sapiens
aaugagagaccuguacuguau

SEQ ID NO: 2436 - RNA, 22 nt, Homo sapiens
uccaguacaggucucucauuuc

SEQ ID NO: 2437 - RNA, 22 nt, Homo sapiens
ugggauccagacagugggagaa

SEQ ID NO: 2438 - RNA, 22 nt, Homo sapiens
uucucccacuaccaggcuccca

SEQ ID NO: 2439 - RNA, 22 nt, Homo sapiens
ccaaccuagguggucagaguug

SEQ ID NO: 2440 - RNA, 22 nt, Homo sapiens
aacucugaccccuuagguugau

SEQ ID NO: 2441 - RNA, 23 nt, Homo sapiens
gugccaccuuaacugcagccaau

SEQ ID NO: 2442 - RNA, 22 nt, Homo sapiens
aaguuggcugcaguuaaggugg

SEQ ID NO: 2443 - RNA, 22 nt, Homo sapiens
aagggggaaggaaacauggaga

SEQ ID NO: 2444 - RNA, 22 nt, Homo sapiens
uccauguuuccuucccccuucu

SEQ ID NO: 2445 - RNA, 21 nt, Homo sapiens
acacauggguggcuguggccu

SEQ ID NO: 2446 - RNA, 22 nt, Homo sapiens
uaggccacagccacccaugugu

SEQ ID NO: 2447 - RNA, 21 nt, Homo sapiens
agcuguaccugaaaccaagca

SEQ ID NO: 2448 - RNA, 22 nt, Homo sapiens
ucacaaaucuauaauaugcagg

SEQ ID NO: 2449 - RNA, 21 nt, Homo sapiens
ugcuuaaguuguaccaaguau

SEQ ID NO: 2450 - RNA, 22 nt, Homo sapiens
ccuggcauauuugguauaacuu

SEQ ID NO: 2451 - RNA, 22 nt, Homo sapiens
ugagggcuccaggugacggugg

SEQ ID NO: 2452 - RNA, 22 nt, Homo sapiens
accugccagcaccucccugcag

SEQ ID NO: 2453 - RNA, 23 nt, Homo sapiens
ggcaggagggcugugccagguug

SEQ ID NO: 2454 - RNA, 22 nt, Homo sapiens
cccucucuggcuccuccccaaa

SEQ ID NO: 2455 - RNA, 24 nt, Homo sapiens
ugggggagccaugagauaagagca

SEQ ID NO: 2456 - RNA, 21 nt, Homo sapiens
guaccuucugguucagcuagu

SEQ ID NO: 2457 - RNA, 23 nt, Homo sapiens
aacugaaccaggagugagcuucg

SEQ ID NO: 2458 - RNA, 22 nt, Homo sapiens
uggggaaggcgucagugucggg

SEQ ID NO: 2459 - RNA, 21 nt, Homo sapiens
agacccugcagccuucccacc

SEQ ID NO: 2460 - RNA, 22 nt, Homo sapiens
acccagguucccucuggccgca

SEQ ID NO: 2461 - RNA, 23 nt, Homo sapiens
agggccagaggagccuggagugg

SEQ ID NO: 2462 - RNA, 22 nt, Homo sapiens
auagugggaagcuggcagauuc

SEQ ID NO: 2463 - RNA, 21 nt, Homo sapiens
aucugccagcuuccacagugg

SEQ ID NO: 2464 - RNA, 25 nt, Homo sapiens
caugcugaccucccuccugccccag

SEQ ID NO: 2465 - RNA, 23 nt, Homo sapiens
ugggaggggagaggcagcaagca

SEQ ID NO: 2466 - RNA, 22 nt, Homo sapiens
ucauuuaucuguugggaagcua

SEQ ID NO: 2467 - RNA, 23 nt, Homo sapiens
cuggcggagcccauuccaugcca

SEQ ID NO: 2468 - RNA, 22 nt, Homo sapiens
cacacaaguggcccccaacacu

SEQ ID NO: 2469 - RNA, 22 nt, Homo sapiens
ugcugggggccacaugagugug

SEQ ID NO: 2470 - RNA, 21 nt, Homo sapiens
gcccugaccuguccuguucug

SEQ ID NO: 2471 - RNA, 23 nt, Homo sapiens
uguagagcagggagcaggaagcu

SEQ ID NO: 2472 - RNA, 22 nt, Homo sapiens
ccaccaggucuagcauugggau

SEQ ID NO: 2473 - RNA, 22 nt, Homo sapiens
aaucccaaugcuagacccggug

SEQ ID NO: 2474 - RNA, 22 nt, Homo sapiens
gcugcgggcugcggucagggcg

SEQ ID NO: 2475 - RNA, 21 nt, Homo sapiens
aaaggugcucaaauuagacau

SEQ ID NO: 2476 - RNA, 22 nt, Homo sapiens
ccuaauuugaacaccuucggua

SEQ ID NO: 2477 - RNA, 19 nt, Homo sapiens
aggcagguuaucugggcug

SEQ ID NO: 2478 - RNA, 20 nt, Homo sapiens
augcgaggaugcugacagug

SEQ ID NO: 2479 - RNA, 22 nt, Homo sapiens
ugaaacuggagcgccuggagga

SEQ ID NO: 2480 - RNA, 22 nt, Homo sapiens
accagcgcguuuucaguuucau

SEQ ID NO: 2481 - RNA, 25 nt, Homo sapiens
aagggaggaggagcggaggggcccu

SEQ ID NO: 2482 - RNA, 22 nt, Homo sapiens
gcccgagaggauccgucccugc

SEQ ID NO: 2483 - RNA, 22 nt, Homo sapiens
aggacugauccucucgggcagg

SEQ ID NO: 2484 - RNA, 23 nt, Homo sapiens
cgggcuguccggaggggucggcu

SEQ ID NO: 2485 - RNA, 23 nt, Homo sapiens
ucuguauucuccuuugccugcag

SEQ ID NO: 2486 - RNA, 23 nt, Homo sapiens
ucaggcaaagggauauuuacaga

SEQ ID NO: 2487 - RNA, 21 nt, Homo sapiens
uuucugucuuuucugguccag

SEQ ID NO: 2488 - RNA, 23 nt, Homo sapiens
uggccggaugggacaggaggcau

SEQ ID NO: 2489 - RNA, 23 nt, Homo sapiens
ucuaaagacuagacuucgcuaug

SEQ ID NO: 2490 - RNA, 23 nt, Homo sapiens
uggcccggcgacgucucacgguc

SEQ ID NO: 2491 - RNA, 23 nt, Homo sapiens
ugaguggggcucccgggacggcg

SEQ ID NO: 2492 - RNA, 21 nt, Homo sapiens
agcggugcuccugcgggccga

SEQ ID NO: 2493 - RNA, 23 nt, Homo sapiens
ccggucccaggagaaccugcaga

SEQ ID NO: 2494 - RNA, 22 nt, Homo sapiens
aaggcccgggcuuuccucccag

SEQ ID NO: 2495 - RNA, 22 nt, Homo sapiens
agggaaggaggcuuggucuuag

SEQ ID NO: 2496 - RNA, 21 nt, Homo sapiens
gagguuuggggaggauuugcu

SEQ ID NO: 2497 - RNA, 20 nt, Homo sapiens
cgccccuccugcccccacag

SEQ ID NO: 2498 - RNA, 22 nt, Homo sapiens
ugcggggacaggccagggcauc

SEQ ID NO: 2499 - RNA, 22 nt, Homo sapiens
ccugacccacccccucccgcag

SEQ ID NO: 2500 - RNA, 22 nt, Homo sapiens
cucgggcggaggugguugagug

SEQ ID NO: 2501 - RNA, 24 nt, Homo sapiens
agaggacccguagcugcuagaagg

SEQ ID NO: 2502 - RNA, 22 nt, Homo sapiens
uuguggaucucaaggaugugcu

SEQ ID NO: 2503 - RNA, 22 nt, Homo sapiens
uucucuuucuuuagccuugugu

SEQ ID NO: 2504 - RNA, 22 nt, Homo sapiens
caaggccaaaggaagagaacag

SEQ ID NO: 2505 - RNA, 23 nt, Homo sapiens
augcggaccuggguuagcggagu

SEQ ID NO: 2506 - RNA, 22 nt, Homo sapiens
agccaggcucugaagggaaagu

SEQ ID NO: 2507 - RNA, 22 nt, Homo sapiens
uuucccuucagagccuggcuuu

SEQ ID NO: 2508 - RNA, 22 nt, Homo sapiens
ccagagaugguugccuuccuau

SEQ ID NO: 2509 - RNA, 23 nt, Homo sapiens
cagggaggcgcucacucucugcu

SEQ ID NO: 2510 - RNA, 22 nt, Homo sapiens
caugacgucacagaggcuucgc

SEQ ID NO: 2511 - RNA, 23 nt, Homo sapiens
aggccucugugacgucacggugu

SEQ ID NO: 2512 - RNA, 23 nt, Homo sapiens
ugccccaccugcugaccacccuc

SEQ ID NO: 2513 - RNA, 23 nt, Homo sapiens
gugagugggagccgguggggcug

SEQ ID NO: 2514 - RNA, 21 nt, Homo sapiens
uaggacuagauguuggaauua

SEQ ID NO: 2515 - RNA, 22 nt, Homo sapiens
aaauucauguucaaucuaaacc

SEQ ID NO: 2516 - RNA, 22 nt, Homo sapiens
uuuagauugaacaugaaguuag

SEQ ID NO: 2517 - RNA, 21 nt, Homo sapiens
gagggcaugcgcacuuugucc

SEQ ID NO: 2518 - RNA, 21 nt, Homo sapiens
acaaggugugcaugccugacc

SEQ ID NO: 2519 - RNA, 22 nt, Homo sapiens
cuucugaucaagauuuguggug

SEQ ID NO: 2520 - RNA, 21 nt, Homo sapiens
ccaaaucuugaucagaagccu

SEQ ID NO: 2521 - RNA, 24 nt, Homo sapiens
aggcaggggcuggugcugggcggg

SEQ ID NO: 2522 - RNA, 21 nt, Homo sapiens
cgccugcccagcccuccugcu

SEQ ID NO: 2523 - RNA, 22 nt, Homo sapiens
uuaacuccuuucacacccaugg

SEQ ID NO: 2524 - RNA, 21 nt, Homo sapiens
uggauguggaaggaguuaucu

SEQ ID NO: 2525 - RNA, 22 nt, Homo sapiens
ugagugauugauagcuauguuc

SEQ ID NO: 2526 - RNA, 21 nt, Homo sapiens
auagcaauugcucuuuuggaa

SEQ ID NO: 2527 - RNA, 21 nt, Homo sapiens
ucugaaagagcaguugguguu

SEQ ID NO: 2528 - RNA, 23 nt, Homo sapiens
cgcgggcgcuccuggccgccgcc

SEQ ID NO: 2529 - RNA, 20 nt, Homo sapiens
ccaggagauccagagagaau

SEQ ID NO: 2530 - RNA, 22 nt, Homo sapiens
auucucucuggaucccauggau

SEQ ID NO: 2531 - RNA, 22 nt, Homo sapiens
ucugccauccucccuccccuac

SEQ ID NO: 2532 - RNA, 24 nt, Homo sapiens
ggugggauggagagaagguaugag

SEQ ID NO: 2533 - RNA, 18 nt, Homo sapiens
ugagaugacacuguagcu

SEQ ID NO: 2534 - RNA, 21 nt, Homo sapiens
agcagacuugaccuacaauua

SEQ ID NO: 2535 - RNA, 22 nt, Homo sapiens
ccugcaacuuugccugaucaga

SEQ ID NO: 2536 - RNA, 22 nt, Homo sapiens
ugaucaggcaaaauugcagacu

SEQ ID NO: 2537 - RNA, 22 nt, Homo sapiens
cagaacaggagcauagaaaggc

SEQ ID NO: 2538 - RNA, 21 nt, Homo sapiens
auugccuaacaugugccagaa

SEQ ID NO: 2539 - RNA, 22 nt, Homo sapiens
ucugguauguaguagguaauaa

SEQ ID NO: 2540 - RNA, 22 nt, Homo sapiens
uuaauuuuuuguuucggucacu

SEQ ID NO: 2541 - RNA, 23 nt, Homo sapiens
cuugccauccugguccacugcau

SEQ ID NO: 2542 - RNA, 22 nt, Homo sapiens
guggaccaggauggcaagggcu

SEQ ID NO: 2543 - RNA, 22 nt, Homo sapiens
auaccucaucuagaaugcugua

SEQ ID NO: 2544 - RNA, 22 nt, Homo sapiens
uucuagaugagagauauauaua

SEQ ID NO: 2545 - RNA, 22 nt, Homo sapiens
ucuucuuccuuugcagaguuga

SEQ ID NO: 2546 - RNA, 22 nt, Homo sapiens
aauucuguaaaggaagaagagg

SEQ ID NO: 2547 - RNA, 22 nt, Homo sapiens
uaggagggaauaguaaaagcag

SEQ ID NO: 2548 - RNA, 22 nt, Homo sapiens
acccuugagccugaucccuagc

SEQ ID NO: 2549 - RNA, 22 nt, Homo sapiens
aauguuggaauccucgcuagag

SEQ ID NO: 2550 - RNA, 21 nt, Homo sapiens
uagcggggauuccaauauugg

SEQ ID NO: 2551 - RNA, 22 nt, Homo sapiens
ugauugucuucauaucuagaac

SEQ ID NO: 2552 - RNA, 22 nt, Homo sapiens
uucuggauaugaagacaaucaa

SEQ ID NO: 2553 - RNA, 23 nt, Homo sapiens
ccccgguguuggggcgcgucugc

SEQ ID NO: 2554 - RNA, 21 nt, Homo sapiens
ggcgcgcccagcucccgggcu

SEQ ID NO: 2555 - RNA, 20 nt, Homo sapiens
ugaggagaugcugggacuga

SEQ ID NO: 2556 - RNA, 21 nt, Homo sapiens
agagucggcgacgccgccagc

SEQ ID NO: 2557 - RNA, 22 nt, Homo sapiens
ugaagccagcucuggucugggc

SEQ ID NO: 2558 - RNA, 22 nt, Homo sapiens
ugagaccaggacuggaugcacc

SEQ ID NO: 2559 - RNA, 24 nt, Homo sapiens
gaugcgccgcccacugccccgcgc

SEQ ID NO: 2560 - RNA, 22 nt, Homo sapiens
gcggggguggcggcggcauccc

SEQ ID NO: 2561 - RNA, 22 nt, Homo sapiens
uuacggaccagcuaagggaggc

SEQ ID NO: 2562 - RNA, 21 nt, Homo sapiens
cacacauagcagguguauaua

SEQ ID NO: 2563 - RNA, 22 nt, Homo sapiens
guauacaccugauauguguaug

SEQ ID NO: 2564 - RNA, 22 nt, Homo sapiens
ugaaugguaaagcgaugucaca

SEQ ID NO: 2565 - RNA, 20 nt, Homo sapiens
aucgcuuuaccauucauguu

SEQ ID NO: 2566 - RNA, 18 nt, Homo sapiens
uggauaugaugacugaaa

SEQ ID NO: 2567 - RNA, 18 nt, Homo sapiens
cggugagcgcucgcuggc

SEQ ID NO: 2568 - RNA, 23 nt, Homo sapiens
ucugcacugugaguuggcuggcu

SEQ ID NO: 2569 - RNA, 24 nt, Homo sapiens
acauccugcuccacagggcagagg

SEQ ID NO: 2570 - RNA, 22 nt, Homo sapiens
ucuggcuaucucacgagacugu

SEQ ID NO: 2571 - RNA, 22 nt, Homo sapiens
auauuauuagccacuucuggau

SEQ ID NO: 2572 - RNA, 21 nt, Homo sapiens
agaaguggcuaauaauauuga

SEQ ID NO: 2573 - RNA, 22 nt, Homo sapiens
uaaaguggcagaguauagacac

SEQ ID NO: 2574 - RNA, 22 nt, Homo sapiens
ugucuauacucugucacuuuac

SEQ ID NO: 2575 - RNA, 21 nt, Homo sapiens
ucucaguaaguggcacucugu

SEQ ID NO: 2576 - RNA, 21 nt, Homo sapiens
gacagagugccacuuacugaa

SEQ ID NO: 2577 - RNA, 22 nt, Homo sapiens
aacucacgaaguauaccgaagu

SEQ ID NO: 2578 - RNA, 22 nt, Homo sapiens
uucgguauacuuugugaauugg

SEQ ID NO: 2579 - RNA, 22 nt, Homo sapiens
acuggcaugcugcauuuauaua

SEQ ID NO: 2580 - RNA, 22 nt, Homo sapiens
aucuaaaugcagcaugccaguc

SEQ ID NO: 2581 - RNA, 19 nt, Homo sapiens
cauccguccgucuguccac

SEQ ID NO: 2582 - RNA, 21 nt, Homo sapiens
aguggaccgaggaaggaagga

SEQ ID NO: 2583 - RNA, 22 nt, Homo sapiens
uacacaagaaaaccaaggcuca

SEQ ID NO: 2584 - RNA, 23 nt, Homo sapiens
uacauggauggaaaccuucaagc

SEQ ID NO: 2585 - RNA, 22 nt, Homo sapiens
uauggagguucuagaccauguu

SEQ ID NO: 2586 - RNA, 21 nt, Homo sapiens
uaacauaauaguguggauuga

SEQ ID NO: 2587 - RNA, 21 nt, Homo sapiens
ugcuuaaccuugcccucgaaa

SEQ ID NO: 2588 - RNA, 21 nt, Homo sapiens
uuggacgguaagguuaagcaa

SEQ ID NO: 2589 - RNA, 21 nt, Homo sapiens
ucacuccucuccucccgucuu

SEQ ID NO: 2590 - RNA, 22 nt, Homo sapiens
aagacgggaggaaagaagggag

SEQ ID NO: 2591 - RNA, 22 nt, Homo sapiens
ucaggcucaguccccucccgau

SEQ ID NO: 2592 - RNA, 22 nt, Homo sapiens
gucauacacggcucuccucucu

SEQ ID NO: 2593 - RNA, 22 nt, Homo sapiens
agaggcuggccgugaugaauuc

SEQ ID NO: 2594 - RNA, 21 nt, Homo sapiens
cggggcagcucaguacaggau

SEQ ID NO: 2595 - RNA, 22 nt, Homo sapiens
uccuguacugagcugccccgag

SEQ ID NO: 2596 - RNA, 22 nt, Homo sapiens
aaucauacagggacauccaguu

SEQ ID NO: 2597 - RNA, 22 nt, Homo sapiens
aaucguacagggucauccacuu

SEQ ID NO: 2598 - RNA, 21 nt, Homo sapiens
uugaaaggcuauuucuugguc

SEQ ID NO: 2599 - RNA, 21 nt, Homo sapiens
cccagauaauggcacucucaa

SEQ ID NO: 2600 - RNA, 22 nt, Homo sapiens
gugacaucacauauacggcagc

SEQ ID NO: 2601 - RNA, 22 nt, Homo sapiens
caaccuggaggacuccaugcug

SEQ ID NO: 2602 - RNA, 20 nt, Homo sapiens
ccauggaucuccaggugggu

SEQ ID NO: 2603 - RNA, 22 nt, Homo sapiens
cuuaugcaagauucccuucuac

SEQ ID NO: 2604 - RNA, 22 nt, Homo sapiens
aguggggaacccuuccaugagg

SEQ ID NO: 2605 - RNA, 23 nt, Homo sapiens
aggaccugcgggacaagauucuu

SEQ ID NO: 2606 - RNA, 22 nt, Homo sapiens
ugaaggucuacugugugccagg

SEQ ID NO: 2607 - RNA, 22 nt, Homo sapiens
uuguacaugguaggcuuucauu

SEQ ID NO: 2608 - RNA, 22 nt, Homo sapiens
ugaaacauacacgggaaaccuc

SEQ ID NO: 2609 - RNA, 22 nt, Homo sapiens
aaacaaacauggugcacuucuu

SEQ ID NO: 2610 - RNA, 22 nt, Homo sapiens
gaaguugcccauguuauuuucg

SEQ ID NO: 2611 - RNA, 22 nt, Homo sapiens
ugaguauuacauggccaaucuc

SEQ ID NO: 2612 - RNA, 22 nt, Homo sapiens
caaaccacacugugguguuaga

SEQ ID NO: 2613 - RNA, 21 nt, Homo sapiens
cagcagcacacugugguuugu

SEQ ID NO: 2614 - RNA, 23 nt, Homo sapiens
uuucaagccagggggcguuuuuc

SEQ ID NO: 2615 - RNA, 20 nt, Homo sapiens
ucacuaccugacaauacagu

SEQ ID NO: 2616 - RNA, 21 nt, Homo sapiens
ugcuguauugucagguaguga

SEQ ID NO: 2617 - RNA, 22 nt, Homo sapiens
aacaucacagcaagucugugcu

SEQ ID NO: 2618 - RNA, 21 nt, Homo sapiens
uuaagacuugcagugauguuu

SEQ ID NO: 2619 - RNA, 22 nt, Homo sapiens
aacaucacugcaagucuuaaca

SEQ ID NO: 2620 - RNA, 21 nt, Homo sapiens
acagacuugcugugauguuca

SEQ ID NO: 2621 - RNA, 22 nt, Homo sapiens
ucaggacacuucugaacuugga

SEQ ID NO: 2622 - RNA, 22 nt, Homo sapiens
caguucagaaguguuccugagu

SEQ ID NO: 2623 - RNA, 22 nt, Homo sapiens
uucugccucuguccagguccuu

SEQ ID NO: 2624 - RNA, 24 nt, Homo sapiens
agggcuggacucagcggcggagcu

SEQ ID NO: 2625 - RNA, 21 nt, Homo sapiens
ugacugccucacugaccacuu

SEQ ID NO: 2626 - RNA, 24 nt, Homo sapiens
aauuugguuucugaggcacuuagu

SEQ ID NO: 2627 - RNA, 21 nt, Homo sapiens
uacuuuucuagguuguugggg

SEQ ID NO: 2628 - RNA, 23 nt, Homo sapiens
ucacaacaaccuugcaggguaga

SEQ ID NO: 2629 - RNA, 22 nt, Homo sapiens
cuuggauuuuccugggccucag

SEQ ID NO: 2630 - RNA, 22 nt, Homo sapiens
ugaggacagggcaaauucacga

SEQ ID NO: 2631 - RNA, 21 nt, Homo sapiens
uuucccuuuccauccuggcag

SEQ ID NO: 2632 - RNA, 21 nt, Homo sapiens
uugccagggcaggagguggaa

SEQ ID NO: 2633 - RNA, 22 nt, Homo sapiens
aucauaugaaccaaacucuaau

SEQ ID NO: 2634 - RNA, 22 nt, Homo sapiens
uagagucuggcugauaugguuu

SEQ ID NO: 2635 - RNA, 21 nt, Homo sapiens
ccugugcucccagggccucgc

SEQ ID NO: 2636 - RNA, 22 nt, Homo sapiens
ugaggcccuuggggcacagugg

SEQ ID NO: 2637 - RNA, 22 nt, Homo sapiens
uccuaaaucugaaaguccaaaa

SEQ ID NO: 2638 - RNA, 24 nt, Homo sapiens
uuggacuuuuucagauuuggggau

SEQ ID NO: 2639 - RNA, 22 nt, Homo sapiens
augcaccugggcaaggauucug

SEQ ID NO: 2640 - RNA, 23 nt, Homo sapiens
uaauccuugcuaccugggugaga

SEQ ID NO: 2641 - RNA, 18 nt, Homo sapiens
aauccuugcuaccugggu

SEQ ID NO: 2642 - RNA, 22 nt, Homo sapiens
uuuugugucucccauuccccag

SEQ ID NO: 2643 - RNA, 22 nt, Homo sapiens
agggggauggcagagcaaaauu

SEQ ID NO: 2644 - RNA, 22 nt, Homo sapiens
gugcauggcuguauauauaaca

SEQ ID NO: 2645 - RNA, 21 nt, Homo sapiens
uauauauacagccaugcacuc

SEQ ID NO: 2646 - RNA, 22 nt, Homo sapiens
aaugcacccgggcaaggauucu

SEQ ID NO: 2647 - RNA, 22 nt, Homo sapiens
aauccuuugucccugggugaga

SEQ ID NO: 2648 - RNA, 22 nt, Homo sapiens
aaugcaccugggcaaggauuca

SEQ ID NO: 2649 - RNA, 21 nt, Homo sapiens
auccuugcuaucugggugcua

SEQ ID NO: 2650 - RNA, 23 nt, Homo sapiens
gggguauuguuuccgcugccagg

SEQ ID NO: 2651 - RNA, 23 nt, Homo sapiens
uagcagcgggaacaguucugcag

SEQ ID NO: 2652 - RNA, 22 nt, Homo sapiens
agacccuggucugcacucuauc

SEQ ID NO: 2653 - RNA, 21 nt, Homo sapiens
uugcagcugcgguuguaaggu

SEQ ID NO: 2654 - RNA, 22 nt, Homo sapiens
cgucaacacuugcugguuuccu

SEQ ID NO: 2655 - RNA, 22 nt, Homo sapiens
gggagccaggaaguauugaugu

SEQ ID NO: 2656 - RNA, 21 nt, Homo sapiens
uaaggcacccuucugaguaga

SEQ ID NO: 2657 - RNA, 22 nt, Homo sapiens
uauucaggaagguguuacuuaa

SEQ ID NO: 2658 - RNA, 21 nt, Homo sapiens
uuuugcaccuuuuggagugaa

SEQ ID NO: 2659 - RNA, 23 nt, Homo sapiens
ugauuguagccuuuuggaguaga

SEQ ID NO: 2660 - RNA, 23 nt, Homo sapiens
uacuccagagggcgucacucaug

SEQ ID NO: 2661 - RNA, 23 nt, Homo sapiens
ggguuuguagcuuugcuggcaug

SEQ ID NO: 2662 - RNA, 23 nt, Homo sapiens
cagggcucagggauuggauggag

SEQ ID NO: 2663 - RNA, 23 nt, Homo sapiens
augcuacucggaaaucccacuga

SEQ ID NO: 2664 - RNA, 21 nt, Homo sapiens
gugggauuucugaguagcauc

SEQ ID NO: 2665 - RNA, 23 nt, Homo sapiens
ccggggcagauugguguagggug

SEQ ID NO: 2666 - RNA, 23 nt, Homo sapiens
acggagacgacaagacugugcug

SEQ ID NO: 2667 - RNA, 22 nt, Homo sapiens
aauccacgcugagcuuggcauc

SEQ ID NO: 2668 - RNA, 23 nt, Homo sapiens
aggaaaugaggcuggcuaggagc

SEQ ID NO: 2669 - RNA, 22 nt, Homo sapiens
uacugcagacguggcaaucaug

SEQ ID NO: 2670 - RNA, 22 nt, Homo sapiens
ugauugguacgucuguggguag

SEQ ID NO: 2671 - RNA, 22 nt, Homo sapiens
aaucagugaaugccuugaaccu

SEQ ID NO: 2672 - RNA, 21 nt, Homo sapiens
uuacaggcgugaaccaccgcg

SEQ ID NO: 2673 - RNA, 21 nt, Homo sapiens
uacugcagacaguggcaauca

SEQ ID NO: 2674 - RNA, 21 nt, Homo sapiens
guuucaccauguuggucaggc

SEQ ID NO: 2675 - RNA, 22 nt, Homo sapiens
uacucaggagaguggcaaucac

SEQ ID NO: 2676 - RNA, 22 nt, Homo sapiens
uucagaucccagcggugccucu

SEQ ID NO: 2677 - RNA, 21 nt, Homo sapiens
gugucuuuugcucugcaguca

SEQ ID NO: 2678 - RNA, 22 nt, Homo sapiens
aagugcugucauagcugagguc

SEQ ID NO: 2679 - RNA, 23 nt, Homo sapiens
cacucagccuugagggcacuuuc

SEQ ID NO: 2680 - RNA, 23 nt, Homo sapiens
uaaauuucaccuuucugagaagg

SEQ ID NO: 2681 - RNA, 18 nt, Homo sapiens
uucacagggaggugucau

SEQ ID NO: 2682 - RNA, 22 nt, Homo sapiens
uucacaaggaggugucauuuau

SEQ ID NO: 2683 - RNA, 23 nt, Homo sapiens
uaaauuucaccuuucugagaaga

SEQ ID NO: 2684 - RNA, 22 nt, Homo sapiens
uucucaaggaggugucguuuau

SEQ ID NO: 2685 - RNA, 21 nt, Homo sapiens
auugacacuucugugaguaga

SEQ ID NO: 2686 - RNA, 23 nt, Homo sapiens
uacucuggagagugacaaucaug

SEQ ID NO: 2687 - RNA, 21 nt, Homo sapiens
auugacaccucugugagugga

SEQ ID NO: 2688 - RNA, 22 nt, Homo sapiens
uucucaagagggaggcaaucau

SEQ ID NO: 2689 - RNA, 22 nt, Homo sapiens
gagugccuucuuuuggagcguu

SEQ ID NO: 2690 - RNA, 24 nt, Homo sapiens
uucuccaaaagaaagcacuuucug

SEQ ID NO: 2691 - RNA, 18 nt, Homo sapiens
ugcuuccuuucagagggu

SEQ ID NO: 2692 - RNA, 23 nt, Homo sapiens
uucucgaggaaagaagcacuuuc

SEQ ID NO: 2693 - RNA, 18 nt, Homo sapiens
ugcuuccuuucagagggu

SEQ ID NO: 2694 - RNA, 22 nt, Homo sapiens
aucuggagguaagaagcacuuu

SEQ ID NO: 2695 - RNA, 22 nt, Homo sapiens
ccucuagauggaagcacugucu

SEQ ID NO: 2696 - RNA, 22 nt, Homo sapiens
aucgugcaucccuuuagagugu

SEQ ID NO: 2697 - RNA, 22 nt, Homo sapiens
aucgugcaucccuuuagagugu

SEQ ID NO: 2698 - RNA, 22 nt, Homo sapiens
aucgugcauccuuuuagagugu

SEQ ID NO: 2699 - RNA, 21 nt, Homo sapiens
agagauugguagaaaucaggu

SEQ ID NO: 2700 - RNA, 21 nt, Homo sapiens
acugaauccucuuuuccucag

SEQ ID NO: 2701 - RNA, 22 nt, Homo sapiens
ugggaugagggauugaagugga

SEQ ID NO: 2702 - RNA, 23 nt, Homo sapiens
aaucggacccauuuaaaccggag

SEQ ID NO: 2703 - RNA, 24 nt, Homo sapiens
ucugggcacaggcggauggacagg

SEQ ID NO: 2704 - RNA, 22 nt, Homo sapiens
gaaagcgcuucccuuugcugga

SEQ ID NO: 2705 - RNA, 20 nt, Homo sapiens
cugcaaagggaagcccuuuc

SEQ ID NO: 2706 - RNA, 22 nt, Homo sapiens
caaagcgcuccccuuuagaggu

SEQ ID NO: 2707 - RNA, 23 nt, Homo sapiens
caaagcgcuucucuuuagagugu

SEQ ID NO: 2708 - RNA, 23 nt, Homo sapiens
ucucuggagggaagcacuuucug

SEQ ID NO: 2709 - RNA, 21 nt, Homo sapiens
caaagcgcuucccuuuggagc

SEQ ID NO: 2710 - RNA, 22 nt, Homo sapiens
cucuagagggaagcacuuucug

SEQ ID NO: 2711 - RNA, 21 nt, Homo sapiens
aaagcgcuucccuucagagug

SEQ ID NO: 2712 - RNA, 22 nt, Homo sapiens
cucuagagggaagcgcuuucug

SEQ ID NO: 2713 - RNA, 21 nt, Homo sapiens
gaaagcgcuucucuuuagagg

SEQ ID NO: 2714 - RNA, 22 nt, Homo sapiens
cucuagagggaagcacuuucuc

SEQ ID NO: 2715 - RNA, 21 nt, Homo sapiens
ccagugacugagcuggagcca

SEQ ID NO: 2716 - RNA, 22 nt, Homo sapiens
aggauaggaagaaugaagugcu

SEQ ID NO: 2717 - RNA, 22 nt, Homo sapiens
aggagaguggauuccagguggu

SEQ ID NO: 2718 - RNA, 22 nt, Homo sapiens
uccuccucuaccucaucccagu

SEQ ID NO: 2719 - RNA, 22 nt, Homo sapiens
ugagggguuuggaaugggaugg

SEQ ID NO: 2720 - RNA, 21 nt, Homo sapiens
auccaguucucugagggggcu

SEQ ID NO: 2721 - RNA, 22 nt, Homo sapiens
aaccccuaaggcaacuggaugg

SEQ ID NO: 2722 - RNA, 21 nt, Homo sapiens
ucauccucgucucccucccag

SEQ ID NO: 2723 - RNA, 22 nt, Homo sapiens
agggaaggggacgaggguuggg

SEQ ID NO: 2724 - RNA, 23 nt, Homo sapiens
aagaagagacugagucaucgaau

SEQ ID NO: 2725 - RNA, 23 nt, Homo sapiens
caauggcacaaacucauucuuga

SEQ ID NO: 2726 - RNA, 22 nt, Homo sapiens
aaagugcauccuuuuagagugu

SEQ ID NO: 2727 - RNA, 22 nt, Homo sapiens
cucuagagggaagcgcuuucug

SEQ ID NO: 2728 - RNA, 22 nt, Homo sapiens
aaagugcauccuuuuagagguu

SEQ ID NO: 2729 - RNA, 22 nt, Homo sapiens
cucuagagggaagcgcuuucug

SEQ ID NO: 2730 - RNA, 22 nt, Homo sapiens
aaagugcaucuuuuuagaggau

SEQ ID NO: 2731 - RNA, 22 nt, Homo sapiens
cucuagagggaagcgcuuucug

SEQ ID NO: 2732 - RNA, 22 nt, Homo sapiens
caaagugccucccuuuagagug

SEQ ID NO: 2733 - RNA, 22 nt, Homo sapiens
aagugccuccuuuuagaguguu

SEQ ID NO: 2734 - RNA, 22 nt, Homo sapiens
uucuccaaaagggagcacuuuc

SEQ ID NO: 2735 - RNA, 22 nt, Homo sapiens
aaagugcuucccuuuggacugu

SEQ ID NO: 2736 - RNA, 21 nt, Homo sapiens
cuccagagggaaguacuuucu

SEQ ID NO: 2737 - RNA, 21 nt, Homo sapiens
aaagugcuuccuuuuagaggg

SEQ ID NO: 2738 - RNA, 22 nt, Homo sapiens
aaagugcuuccuuuuagagggu

SEQ ID NO: 2739 - RNA, 22 nt, Homo sapiens
cucuagagggaagcacuuucug

SEQ ID NO: 2740 - RNA, 22 nt, Homo sapiens
aaagugcuucucuuuggugggu

SEQ ID NO: 2741 - RNA, 20 nt, Homo sapiens
cuacaaagggaagcccuuuc

SEQ ID NO: 2742 - RNA, 21 nt, Homo sapiens
aaagugcuuccuuuuugaggg

SEQ ID NO: 2743 - RNA, 22 nt, Homo sapiens
aagugcuuccuuuuagaggguu

SEQ ID NO: 2744 - RNA, 24 nt, Homo sapiens
acaaagugcuucccuuuagagugu

SEQ ID NO: 2745 - RNA, 22 nt, Homo sapiens
acaaagugcuucccuuuagagu

SEQ ID NO: 2746 - RNA, 22 nt, Homo sapiens
aacgcacuucccuuuagagugu

SEQ ID NO: 2747 - RNA, 22 nt, Homo sapiens
aaaaugguucccuuuagagugu

SEQ ID NO: 2748 - RNA, 22 nt, Homo sapiens
cucuagagggaagcgcuuucug

SEQ ID NO: 2749 - RNA, 23 nt, Homo sapiens
gaacgcgcuucccuauagagggu

SEQ ID NO: 2750 - RNA, 22 nt, Homo sapiens
cucuagagggaagcgcuuucug

SEQ ID NO: 2751 - RNA, 21 nt, Homo sapiens
gaaggcgcuucccuuuggagu

SEQ ID NO: 2752 - RNA, 22 nt, Homo sapiens
cuacaaagggaagcacuuucuc

SEQ ID NO: 2753 - RNA, 22 nt, Homo sapiens
gaaggcgcuucccuuuagagcg

SEQ ID NO: 2754 - RNA, 21 nt, Homo sapiens
cuccagagggaugcacuuucu

SEQ ID NO: 2755 - RNA, 22 nt, Homo sapiens
cucuagagggaagcacuuucug

SEQ ID NO: 2756 - RNA, 22 nt, Homo sapiens
gaaagugcuuccuuuuagaggc

SEQ ID NO: 2757 - RNA, 23 nt, Homo sapiens
cucuugagggaagcacuuucugu

SEQ ID NO: 2758 - RNA, 20 nt, Homo sapiens
cugcaaagggaagcccuuuc

SEQ ID NO: 2759 - RNA, 22 nt, Homo sapiens
ccucccacacccaaggcuugca

SEQ ID NO: 2760 - RNA, 22 nt, Homo sapiens
caugccuugaguguaggaccgu

SEQ ID NO: 2761 - RNA, 22 nt, Homo sapiens
aucauacaaggacaauuucuuu

SEQ ID NO: 2762 - RNA, 22 nt, Homo sapiens
ggagaaauuauccuuggugugu

SEQ ID NO: 2763 - RNA, 22 nt, Homo sapiens
uggugggcacagaaucuggacu

SEQ ID NO: 2764 - RNA, 25 nt, Homo sapiens
aaaggauucugcugucggucccacu

SEQ ID NO: 2765 - RNA, 22 nt, Homo sapiens
ugugacagauugauaacugaaa

SEQ ID NO: 2766 - RNA, 23 nt, Homo sapiens
ucggggaucaucaugucacgaga

SEQ ID NO: 2767 - RNA, 22 nt, Homo sapiens
aaacauucgcggugcacuucuu

SEQ ID NO: 2768 - RNA, 22 nt, Homo sapiens
auucugcauuuuuagcaaguuc

SEQ ID NO: 2769 - RNA, 22 nt, Homo sapiens
accugagguugugcauuucuaa

SEQ ID NO: 2770 - RNA, 22 nt, Homo sapiens
ucagcaaacauuuauugugugc

SEQ ID NO: 2771 - RNA, 22 nt, Homo sapiens
ucaguaaauguuuauuagauga

SEQ ID NO: 2772 - RNA, 22 nt, Homo sapiens
agcuacaguuacuuuugcacca

SEQ ID NO: 2773 - RNA, 20 nt, Homo sapiens
uaaaaacugcaauuacuuuc

SEQ ID NO: 2774 - RNA, 23 nt, Homo sapiens
ugcaaaaguaauugcaguuuuug

SEQ ID NO: 2775 - RNA, 22 nt, Homo sapiens
agaaguaauugcgguuuugcca

SEQ ID NO: 2776 - RNA, 22 nt, Homo sapiens
caaaacuggcaauuacuuuugc

SEQ ID NO: 2777 - RNA, 22 nt, Homo sapiens
aaaaguaauugcgaguuuuacc

SEQ ID NO: 2778 - RNA, 25 nt, Homo sapiens
aaaaaccacaauuacuuuugcacca

SEQ ID NO: 2779 - RNA, 22 nt, Homo sapiens
aaaaguaauuguggauuuugcu

SEQ ID NO: 2780 - RNA, 22 nt, Homo sapiens
caaaaaccggcaauuacuuuug

SEQ ID NO: 2781 - RNA, 22 nt, Homo sapiens
gaaaacgacaaugacuuuugca

SEQ ID NO: 2782 - RNA, 21 nt, Homo sapiens
caaaaacugcaauuacuuuca

SEQ ID NO: 2783 - RNA, 21 nt, Homo sapiens
aaagguaauugugguuucugc

SEQ ID NO: 2784 - RNA, 22 nt, Homo sapiens
caaaaacugcaguuacuuuugc

SEQ ID NO: 2785 - RNA, 20 nt, Homo sapiens
aaaagugauugcaguguuug

SEQ ID NO: 2786 - RNA, 22 nt, Homo sapiens
aaagguaauugcaguuuuuccc

SEQ ID NO: 2787 - RNA, 21 nt, Homo sapiens
uaaaaacugcaauuacuuuua

SEQ ID NO: 2788 - RNA, 23 nt, Homo sapiens
ugcaaaaguaauugcaguuuuug

SEQ ID NO: 2789 - RNA, 21 nt, Homo sapiens
aaaaguaacugcgguuuuuga

SEQ ID NO: 2790 - RNA, 22 nt, Homo sapiens
aacggcaaugacuuuuguacca

SEQ ID NO: 2791 - RNA, 22 nt, Homo sapiens
caaaaacugcaguuacuuuugu

SEQ ID NO: 2792 - RNA, 22 nt, Homo sapiens
aaaaguaauugcgguuuuugcc

SEQ ID NO: 2793 - RNA, 20 nt, Homo sapiens
aaaaggcauugugguuuuug

SEQ ID NO: 2794 - RNA, 22 nt, Homo sapiens
aaagaccgugacuacuuuugca

SEQ ID NO: 2795 - RNA, 22 nt, Homo sapiens
agaaguaacuacgguuuuugca

SEQ ID NO: 2796 - RNA, 19 nt, Homo sapiens
aaaaaccacaauuacuuuu

SEQ ID NO: 2797 - RNA, 19 nt, Homo sapiens
aaaaguaauugcggucuuu

SEQ ID NO: 2798 - RNA, 22 nt, Homo sapiens
caaaaacugcaauuacuuuugc

SEQ ID NO: 2799 - RNA, 22 nt, Homo sapiens
gaaaguaauugcuguuuuugcc

SEQ ID NO: 2800 - RNA, 21 nt, Homo sapiens
uaaaacugcaguuauuuuugc

SEQ ID NO: 2801 - RNA, 21 nt, Homo sapiens
aaaaguaauugcaguuuuugc

SEQ ID NO: 2802 - RNA, 22 nt, Homo sapiens
uaaaacccacaauuauguuugu

SEQ ID NO: 2803 - RNA, 22 nt, Homo sapiens
aaaaguaauugcggguuuugcc

SEQ ID NO: 2804 - RNA, 21 nt, Homo sapiens
caaaaccgcaguaacuuuugu

SEQ ID NO: 2805 - RNA, 22 nt, Homo sapiens
aaaaguuauugcgguuuuggcu

SEQ ID NO: 2806 - RNA, 21 nt, Homo sapiens
uggcaguuacuuuugcaccag

SEQ ID NO: 2807 - RNA, 21 nt, Homo sapiens
aaaaguaauugcgguuuuugc

SEQ ID NO: 2808 - RNA, 20 nt, Homo sapiens
aaaacugcaguuacuuuugc

SEQ ID NO: 2809 - RNA, 18 nt, Homo sapiens
aaaaguacuugcggauuu

SEQ ID NO: 2810 - RNA, 20 nt, Homo sapiens
gugcaaaagucaucacgguu

SEQ ID NO: 2811 - RNA, 22 nt, Homo sapiens
caaaaccgcgauuacucuugca

SEQ ID NO: 2812 - RNA, 21 nt, Homo sapiens
aaaaguaauugugguuuuugc

SEQ ID NO: 2813 - RNA, 21 nt, Homo sapiens
aaaaacugcaaucacuuuugc

SEQ ID NO: 2814 - RNA, 22 nt, Homo sapiens
caaaagugauugugguuuuugc

SEQ ID NO: 2815 - RNA, 22 nt, Homo sapiens
caagaaccucaguugcuuuugu

SEQ ID NO: 2816 - RNA, 22 nt, Homo sapiens
aaaaguaauugugguuuuggcc

SEQ ID NO: 2817 - RNA, 22 nt, Homo sapiens
caaaaaucucaauuacuuuugc

SEQ ID NO: 2818 - RNA, 22 nt, Homo sapiens
aaaaguaauugcgguuuuugcc

SEQ ID NO: 2819 - RNA, 22 nt, Homo sapiens
caaaaaccacaguuucuuuugc

SEQ ID NO: 2820 - RNA, 22 nt, Homo sapiens
aaaaguaauugugguuuuugcc

SEQ ID NO: 2821 - RNA, 22 nt, Homo sapiens
aaaaacugagacuacuuuugca

SEQ ID NO: 2822 - RNA, 19 nt, Homo sapiens
aaaaacuguaauuacuuuu

SEQ ID NO: 2823 - RNA, 22 nt, Homo sapiens
aaaacuguaauuacuuuuguac

SEQ ID NO: 2824 - RNA, 23 nt, Homo sapiens
ugcaaaaguaauugcaguuuuug

SEQ ID NO: 2825 - RNA, 23 nt, Homo sapiens
caaaaaccgcaauuacuuuugca

SEQ ID NO: 2826 - RNA, 22 nt, Homo sapiens
aaaaguaaucgcgguuuuuguc

SEQ ID NO: 2827 - RNA, 22 nt, Homo sapiens
aaaaguaauugcggauuuugcc

SEQ ID NO: 2828 - RNA, 22 nt, Homo sapiens
aaaaguaauugcggucuuuggu

SEQ ID NO: 2829 - RNA, 22 nt, Homo sapiens
aaaaguacuugcggauuuugcu

SEQ ID NO: 2830 - RNA, 22 nt, Homo sapiens
aaaaguauuugcggguuuuguc

SEQ ID NO: 2831 - RNA, 21 nt, Homo sapiens
caaagguauuugugguuuuug

SEQ ID NO: 2832 - RNA, 22 nt, Homo sapiens
caaaaguaauuguggauuuugu

SEQ ID NO: 2833 - RNA, 22 nt, Homo sapiens
ccaaaacugcaguuacuuuugc

SEQ ID NO: 2834 - RNA, 22 nt, Homo sapiens
aaaaguaauugcgguuuuugcc

SEQ ID NO: 2835 - RNA, 22 nt, Homo sapiens
uagcaaaaacugcaguuacuuu

SEQ ID NO: 2836 - RNA, 22 nt, Homo sapiens
gcuggugcaaaaguaauggcgg

SEQ ID NO: 2837 - RNA, 23 nt, Homo sapiens
auggccaaaacugcaguuauuuu

SEQ ID NO: 2838 - RNA, 25 nt, Homo sapiens
aaaaaccacaauuacuuuugcacca

SEQ ID NO: 2839 - RNA, 21 nt, Homo sapiens
caaaagugaucgugguuuuug

SEQ ID NO: 2840 - RNA, 23 nt, Homo sapiens
caaagacugcaauuacuuuugcg

SEQ ID NO: 2841 - RNA, 23 nt, Homo sapiens
aaaaguaacugcgguuuuugccu

SEQ ID NO: 2842 - RNA, 22 nt, Homo sapiens
aaaaguaaucacuguuuuugcc

SEQ ID NO: 2843 - RNA, 23 nt, Homo sapiens
caaaaaccgcaauuacuuuugca

SEQ ID NO: 2844 - RNA, 21 nt, Homo sapiens
ugacaacuauggaugagcucu

SEQ ID NO: 2845 - RNA, 20 nt, Homo sapiens
agugccugagggaguaagag

SEQ ID NO: 2846 - RNA, 22 nt, Homo sapiens
ugucuuacucccucaggcacau

SEQ ID NO: 2847 - RNA, 23 nt, Homo sapiens
agugccugagggaguaagagccc

SEQ ID NO: 2848 - RNA, 22 nt, Homo sapiens
augugccugagggaguaagaca

SEQ ID NO: 2849 - RNA, 20 nt, Homo sapiens
ucuuacucccucaggcacug

SEQ ID NO: 2850 - RNA, 21 nt, Homo sapiens
gcgacccacucuugguuucca

SEQ ID NO: 2851 - RNA, 21 nt, Homo sapiens
gcgacccauacuugguuucag

SEQ ID NO: 2852 - RNA, 22 nt, Homo sapiens
gaaaucaagcgugggugagacc

SEQ ID NO: 2853 - RNA, 21 nt, Homo sapiens
aacaggugacugguuagacaa

SEQ ID NO: 2854 - RNA, 21 nt, Homo sapiens
aaaacggugagauuuuguuuu

SEQ ID NO: 2855 - RNA, 21 nt, Homo sapiens
gcuaguccugacucagccagu

SEQ ID NO: 2856 - RNA, 21 nt, Homo sapiens
aggguaagcugaaccucugau

SEQ ID NO: 2857 - RNA, 22 nt, Homo sapiens
auauuaccauuagcucaucuuu

SEQ ID NO: 2858 - RNA, 22 nt, Homo sapiens
gaugagcucauuguaauaugag

SEQ ID NO: 2859 - RNA, 23 nt, Homo sapiens
guuugcacgggugggccuugucu

SEQ ID NO: 2860 - RNA, 19 nt, Homo sapiens
guccuaggaggcuccucug

SEQ ID NO: 2861 - RNA, 21 nt, Homo sapiens
caauucucaaaggagccuccc

SEQ ID NO: 2862 - RNA, 21 nt, Homo sapiens
guuggggugcaggggucugcu

SEQ ID NO: 2863 - RNA, 22 nt, Homo sapiens
uuagcuuaaggaguaccagauc

SEQ ID NO: 2864 - RNA, 21 nt, Homo sapiens
uaugguacuccuuaagcuaac

SEQ ID NO: 2865 - RNA, 19 nt, Homo sapiens
ugagcugcuguaccaaaau

SEQ ID NO: 2866 - RNA, 22 nt, Homo sapiens
cacauaugaagugagccagcac

SEQ ID NO: 2867 - RNA, 22 nt, Homo sapiens
ugcuggcucauuucauaugugu

SEQ ID NO: 2868 - RNA, 22 nt, Homo sapiens
uuccaugccuccuagaaguucc

SEQ ID NO: 2869 - RNA, 22 nt, Homo sapiens
agccuuccaggagaaauggaga

SEQ ID NO: 2870 - RNA, 22 nt, Homo sapiens
uaaaacuuuaagugugccuagg

SEQ ID NO: 2871 - RNA, 22 nt, Homo sapiens
uaggcacacuuaaaguuauagc

SEQ ID NO: 2872 - RNA, 22 nt, Homo sapiens
gaauauggguauauuaguuugg

SEQ ID NO: 2873 - RNA, 22 nt, Homo sapiens
aaacuaauauacccauauucug

SEQ ID NO: 2874 - RNA, 22 nt, Homo sapiens
uaguucuucccuuugcccaauu

SEQ ID NO: 2875 - RNA, 22 nt, Homo sapiens
cagggaaaugggaagaacuaga

SEQ ID NO: 2876 - RNA, 22 nt, Homo sapiens
cugaauagcugggacuacaggu

SEQ ID NO: 2877 - RNA, 22 nt, Homo sapiens
ugaaguaccagcuacucgagag

SEQ ID NO: 2878 - RNA, 22 nt, Homo sapiens
cagagugacaagcugguuaaag

SEQ ID NO: 2879 - RNA, 22 nt, Homo sapiens
uauccagcuuguuacuauaugc

SEQ ID NO: 2880 - RNA, 21 nt, Homo sapiens
gccccgggcagugugaucauc

SEQ ID NO: 2881 - RNA, 18 nt, Homo sapiens
auggucaccuccgggacu

SEQ ID NO: 2882 - RNA, 19 nt, Homo sapiens
aagucccacuaaugccagc

SEQ ID NO: 2883 - RNA, 21 nt, Homo sapiens
acuggcauuagugggacuuuu

SEQ ID NO: 2884 - RNA, 23 nt, Homo sapiens
ugcacauggcaaccuagcuccca

SEQ ID NO: 2885 - RNA, 21 nt, Homo sapiens
ggcugggugcucuugugcagu

SEQ ID NO: 2886 - RNA, 21 nt, Homo sapiens
uaaaguaaauaugcaccaaaa

SEQ ID NO: 2887 - RNA, 21 nt, Homo sapiens
aauaaaguucauguauggcaa

SEQ ID NO: 2888 - RNA, 21 nt, Homo sapiens
uugccauacauagacuuuauu

SEQ ID NO: 2889 - RNA, 21 nt, Homo sapiens
auacccauagcuuagcuccca

SEQ ID NO: 2890 - RNA, 21 nt, Homo sapiens
ugggagcuaagcuauggguau

SEQ ID NO: 2891 - RNA, 22 nt, Homo sapiens
caaaguuuaagauccuugaagu

SEQ ID NO: 2892 - RNA, 22 nt, Homo sapiens
aucaaggaucuuaaacuuugcc

SEQ ID NO: 2893 - RNA, 20 nt, Homo sapiens
aaaguagcuguaccauuugc

SEQ ID NO: 2894 - RNA, 19 nt, Homo sapiens
agguugacauacguuuccc

SEQ ID NO: 2895 - RNA, 19 nt, Homo sapiens
aggcacggugucagcaggc

SEQ ID NO: 2896 - RNA, 19 nt, Homo sapiens
gggcgccugugaucccaac

SEQ ID NO: 2897 - RNA, 23 nt, Homo sapiens
aguauguucuuccaggacagaac

SEQ ID NO: 2898 - RNA, 20 nt, Homo sapiens
auguauaaauguauacacac

SEQ ID NO: 2899 - RNA, 22 nt, Homo sapiens
gagaaaugcuggacuaaucugc

SEQ ID NO: 2900 - RNA, 22 nt, Homo sapiens
agaaaggguggcaauaccucuu

SEQ ID NO: 2901 - RNA, 22 nt, Homo sapiens
agguauugccacccuuucuagu

SEQ ID NO: 2902 - RNA, 22 nt, Homo sapiens
guagcaccuugcaggauaaggu

SEQ ID NO: 2903 - RNA, 24 nt, Homo sapiens
uacagaugcagauucucugacuuc

SEQ ID NO: 2904 - RNA, 20 nt, Homo sapiens
aacucuagccugagcaacag

SEQ ID NO: 2905 - RNA, 22 nt, Homo sapiens
acagcccagcaguuaucacggg

SEQ ID NO: 2906 - RNA, 21 nt, Homo sapiens
uaucguaucguauuguauugu

SEQ ID NO: 2907 - RNA, 22 nt, Homo sapiens
uuagaacguuuuagggucaaau

SEQ ID NO: 2908 - RNA, 22 nt, Homo sapiens
uaacaaacaccuguaaaacagc

SEQ ID NO: 2909 - RNA, 22 nt, Homo sapiens
agcauacaccuguaguccuaga

SEQ ID NO: 2910 - RNA, 21 nt, Homo sapiens
aguuaaugaauccuggaaagu

SEQ ID NO: 2911 - RNA, 21 nt, Homo sapiens
ucagcuacuaccucuauuagg

SEQ ID NO: 2912 - RNA, 22 nt, Homo sapiens
uugcucugagcuccgagaaagc

SEQ ID NO: 2913 - RNA, 22 nt, Homo sapiens
caaauaauaccacagugggugu

SEQ ID NO: 2914 - RNA, 20 nt, Homo sapiens
aauaauaucacaguaggugu

SEQ ID NO: 2915 - RNA, 22 nt, Homo sapiens
aauaauaucacaguagguguac

SEQ ID NO: 2916 - RNA, 22 nt, Homo sapiens
gcaguggcucugaaaugaacuc

SEQ ID NO: 2917 - RNA, 21 nt, Homo sapiens
cagaucaugggacugucucag

SEQ ID NO: 2918 - RNA, 22 nt, Homo sapiens
acuccaagaagaaucuagacag

SEQ ID NO: 2919 - RNA, 22 nt, Homo sapiens
cucauuuaaguagucugaugcc

SEQ ID NO: 2920 - RNA, 22 nt, Homo sapiens
ucaaguaguuucaugauaaagg

SEQ ID NO: 2921 - RNA, 22 nt, Homo sapiens
ugggggagugcagugauugugg

SEQ ID NO: 2922 - RNA, 22 nt, Homo sapiens
uccugucuuuccuuguuggagc

SEQ ID NO: 2923 - RNA, 22 nt, Homo sapiens
uaaugcauuaaauuauugaagg

SEQ ID NO: 2924 - RNA, 19 nt, Homo sapiens
uuauugucacguucugauu

SEQ ID NO: 2925 - RNA, 22 nt, Homo sapiens
ugagucagcaacauaucccaug

SEQ ID NO: 2926 - RNA, 18 nt, Homo sapiens
aggagaagucgggaaggu

SEQ ID NO: 2927 - RNA, 22 nt, Homo sapiens
cgaaaacagcaauuaccuuugc

SEQ ID NO: 2928 - RNA, 22 nt, Homo sapiens
uuaggccaucaucccauuaugc

SEQ ID NO: 2929 - RNA, 23 nt, Homo sapiens
uguuucggggcucauggccugug

SEQ ID NO: 2930 - RNA, 22 nt, Homo sapiens
aaagguaauugcaguuuuuccc

SEQ ID NO: 2931 - RNA, 22 nt, Homo sapiens
uucuggauaacaugcugaagcu

SEQ ID NO: 2932 - RNA, 22 nt, Homo sapiens
acguuugaaugcuguacaaggc

SEQ ID NO: 2933 - RNA, 20 nt, Homo sapiens
augagcgacugugccugacc

SEQ ID NO: 2934 - RNA, 21 nt, Homo sapiens
ugaguuggccaucugagugag

SEQ ID NO: 2935 - RNA, 20 nt, Homo sapiens
guccgcucggcgguggccca

SEQ ID NO: 2936 - RNA, 24 nt, Homo sapiens
cugaagugauguguaacugaucag

SEQ ID NO: 2937 - RNA, 20 nt, Homo sapiens
gcggagagagaauggggagc

SEQ ID NO: 2938 - RNA, 22 nt, Homo sapiens
cacgcucaugcacacacccaca

SEQ ID NO: 2939 - RNA, 23 nt, Homo sapiens
ugagugugugugugugagugugu

SEQ ID NO: 2940 - RNA, 19 nt, Homo sapiens
gagccaguuggacaggagc

SEQ ID NO: 2941 - RNA, 22 nt, Homo sapiens
aagauguggaaaaauuggaauc

SEQ ID NO: 2942 - RNA, 22 nt, Homo sapiens
auucuaauuucuccacgucuuu

SEQ ID NO: 2943 - RNA, 21 nt, Homo sapiens
uagauaaaauauugguaccug

SEQ ID NO: 2944 - RNA, 21 nt, Homo sapiens
cuucuugugcucuaggauugu

SEQ ID NO: 2945 - RNA, 20 nt, Homo sapiens
gggcuggggcgcggggaggu

SEQ ID NO: 2946 - RNA, 23 nt, Homo sapiens
uucauuugguauaaaccgcgauu

SEQ ID NO: 2947 - RNA, 22 nt, Homo sapiens
uugagaaugaugaaucauuagg

SEQ ID NO: 2948 - RNA, 21 nt, Homo sapiens
ucuuguguucucuagaucagu

SEQ ID NO: 2949 - RNA, 22 nt, Homo sapiens
uaacugguugaacaacugaacc

SEQ ID NO: 2950 - RNA, 23 nt, Homo sapiens
uuacaguuguucaaccaguuacu

SEQ ID NO: 2951 - RNA, 21 nt, Homo sapiens
caaagaggaaggucccauuac

SEQ ID NO: 2952 - RNA, 22 nt, Homo sapiens
ucaguuccaggccaaccaggcu

SEQ ID NO: 2953 - RNA, 22 nt, Homo sapiens
uuaugguuugccugggacugag

SEQ ID NO: 2954 - RNA, 19 nt, Homo sapiens
ugggcguaucuguaugcua

SEQ ID NO: 2955 - RNA, 22 nt, Homo sapiens
uaugcauuguauuuuuaggucc

SEQ ID NO: 2956 - RNA, 21 nt, Homo sapiens
uuuccauaggugaugagucac

SEQ ID NO: 2957 - RNA, 21 nt, Homo sapiens
uuggccacaauggguuagaac

SEQ ID NO: 2958 - RNA, 24 nt, Homo sapiens
ucagaacaaaugccgguucccaga

SEQ ID NO: 2959 - RNA, 22 nt, Homo sapiens
ugagaaccacgucugcucugag

SEQ ID NO: 2960 - RNA, 21 nt, Homo sapiens
uaauuuuauguauaagcuagu

SEQ ID NO: 2961 - RNA, 22 nt, Homo sapiens
gagcuuauucauaaaagugcag

SEQ ID NO: 2962 - RNA, 20 nt, Homo sapiens
agaccauggguucucauugu

SEQ ID NO: 2963 - RNA, 22 nt, Homo sapiens
uugugucaauaugcgaugaugu

SEQ ID NO: 2964 - RNA, 19 nt, Homo sapiens
ugucucugcugggguuucu

SEQ ID NO: 2965 - RNA, 25 nt, Homo sapiens
aggcaccagccaggcauugcucagc

SEQ ID NO: 2966 - RNA, 21 nt, Homo sapiens
gaagugugccguggugugucu

SEQ ID NO: 2967 - RNA, 21 nt, Homo sapiens
aagccugcccggcuccucggg

SEQ ID NO: 2968 - RNA, 22 nt, Homo sapiens
ugugucacucgaugaccacugu

SEQ ID NO: 2969 - RNA, 22 nt, Homo sapiens
uacgucaucguugucaucguca

SEQ ID NO: 2970 - RNA, 20 nt, Homo sapiens
guugugucaguuuaucaaac

SEQ ID NO: 2971 - RNA, 23 nt, Homo sapiens
acuuacagacaagagccuugcuc

SEQ ID NO: 2972 - RNA, 22 nt, Homo sapiens
uggucuaggauuguuggaggag

SEQ ID NO: 2973 - RNA, 23 nt, Homo sapiens
gacacgggcgacagcugcggccc

SEQ ID NO: 2974 - RNA, 22 nt, Homo sapiens
cacacacugcaauuacuuuugc

SEQ ID NO: 2975 - RNA, 19 nt, Homo sapiens
aggcugcggaauucaggac

SEQ ID NO: 2976 - RNA, 23 nt, Homo sapiens
uaaaucccauggugccuucuccu

SEQ ID NO: 2977 - RNA, 21 nt, Homo sapiens
aaacuacugaaaaucaaagau

SEQ ID NO: 2978 - RNA, 21 nt, Homo sapiens
ccugcgagucuccggcggugg

SEQ ID NO: 2979 - RNA, 21 nt, Homo sapiens
gggcuagggccugcugccccc

SEQ ID NO: 2980 - RNA, 21 nt, Homo sapiens
guucaaauccagaucuauaac

SEQ ID NO: 2981 - RNA, 19 nt, Homo sapiens
ccgguuccagucccuggag

SEQ ID NO: 2982 - RNA, 19 nt, Homo sapiens
uucugcugccggccaaggc

SEQ ID NO: 2983 - RNA, 22 nt, Homo sapiens
uccucaucacacugcaccuuag

SEQ ID NO: 2984 - RNA, 20 nt, Homo sapiens
gguagugaguuaucagcuac

SEQ ID NO: 2985 - RNA, 20 nt, Homo sapiens
gauauucagaggcuaggugg

SEQ ID NO: 2986 - RNA, 21 nt, Homo sapiens
acggcccaggcggcauuggug

SEQ ID NO: 2987 - RNA, 21 nt, Homo sapiens
agcaugacagaggagaggugg

SEQ ID NO: 2988 - RNA, 21 nt, Homo sapiens
gggaagagcuguacggccuuc

SEQ ID NO: 2989 - RNA, 19 nt, Homo sapiens
ccgccugagcuagcugugg

SEQ ID NO: 2990 - RNA, 24 nt, Homo sapiens
uuggaagcuuggaccaacuagcug

SEQ ID NO: 2991 - RNA, 25 nt, Homo sapiens
aggggugguguugggacagcuccgu

SEQ ID NO: 2992 - RNA, 19 nt, Homo sapiens
ucuagugcgggcguucccg

SEQ ID NO: 2993 - RNA, 24 nt, Homo sapiens
aggagcagugccggccaaggcgcc

SEQ ID NO: 2994 - RNA, 19 nt, Homo sapiens
gaauacgucugguugaucc

SEQ ID NO: 2995 - RNA, 20 nt, Homo sapiens
cuuauaucagaggcuguggg

SEQ ID NO: 2996 - RNA, 20 nt, Homo sapiens
uuccgccagucgguggccgg

SEQ ID NO: 2997 - RNA, 19 nt, Homo sapiens
aaggggcugggggagcaca

SEQ ID NO: 2998 - RNA, 20 nt, Homo sapiens
ggagguugggaagggcagag

SEQ ID NO: 2999 - RNA, 18 nt, Homo sapiens
ugaggcgggggggcgagc

SEQ ID NO: 3000 - RNA, 20 nt, Homo sapiens
agagaugaagcgggggggcg

SEQ ID NO: 3001 - RNA, 24 nt, Homo sapiens
ggaggccgggguggggcggggcgg

SEQ ID NO: 3002 - RNA, 20 nt, Homo sapiens
aggguguuucucucaucucu

SEQ ID NO: 3003 - RNA, 19 nt, Homo sapiens
ggggagcgaggggcggggc

SEQ ID NO: 3004 - RNA, 21 nt, Homo sapiens
ugagcuaaaugugugcuggga

SEQ ID NO: 3005 - RNA, 23 nt, Homo sapiens
gcgaggaccccucggggucugac

SEQ ID NO: 3006 - RNA, 25 nt, Homo sapiens
gcugggcagggcuucugagcuccuu

SEQ ID NO: 3007 - RNA, 20 nt, Homo sapiens
gggaaaaggaagggggagga

SEQ ID NO: 3008 - RNA, 20 nt, Homo sapiens
gcggaaggcggagcggcgga

SEQ ID NO: 3009 - RNA, 18 nt, Homo sapiens
gugaaggcccggcggaga

SEQ ID NO: 3010 - RNA, 19 nt, Homo sapiens
ugagggagugggugggagg

SEQ ID NO: 3011 - RNA, 19 nt, Homo sapiens
acuggaauuggagucaaaa

SEQ ID NO: 3012 - RNA, 19 nt, Homo sapiens
ugagggaguuggguguaua

SEQ ID NO: 3013 - RNA, 20 nt, Homo sapiens
aggaauguuccuucuuugcc

SEQ ID NO: 3014 - RNA, 19 nt, Homo sapiens
ugagggaguggauuguaug

SEQ ID NO: 3015 - RNA, 19 nt, Homo sapiens
ggcuggucagaugggagug

SEQ ID NO: 3016 - RNA, 19 nt, Homo sapiens
agcagggcuggggauugca

SEQ ID NO: 3017 - RNA, 19 nt, Homo sapiens
ugagggaggagguugggua

SEQ ID NO: 3018 - RNA, 19 nt, Homo sapiens
ugaggugguaggauguaga

SEQ ID NO: 3019 - RNA, 23 nt, Homo sapiens
gaacgccuguucuugccaggugg

SEQ ID NO: 3020 - RNA, 22 nt, Homo sapiens
uccgagccugggucucccucuu

SEQ ID NO: 3021 - RNA, 22 nt, Homo sapiens
ggggguccccggugcucggauc

SEQ ID NO: 3022 - RNA, 22 nt, Homo sapiens
agucauuggaggguuugagcag

SEQ ID NO: 3023 - RNA, 19 nt, Homo sapiens
cagcaggaggugaggggag

SEQ ID NO: 3024 - RNA, 22 nt, Homo sapiens
acucaaaacccuucagugacuu

SEQ ID NO: 3025 - RNA, 22 nt, Homo sapiens
agacuucccauuugaagguggc

SEQ ID NO: 3026 - RNA, 23 nt, Homo sapiens
aaacucuacuuguccuucugagu

SEQ ID NO: 3027 - RNA, 24 nt, Homo sapiens
gaccuggacauguuugugcccagu

SEQ ID NO: 3028 - RNA, 20 nt, Homo sapiens
auggagauagauauagaaau

SEQ ID NO: 3029 - RNA, 21 nt, Homo sapiens
ggcuagcaacagcgcuuaccu

SEQ ID NO: 3030 - RNA, 21 nt, Homo sapiens
acagucugcugagguuggagc

SEQ ID NO: 3031 - RNA, 23 nt, Homo sapiens
aucccuugcaggggcuguugggu

SEQ ID NO: 3032 - RNA, 21 nt, Homo sapiens
cacaagguauugguauuaccu

SEQ ID NO: 3033 - RNA, 22 nt, Homo sapiens
uaguaccaguaccuuguguuca

SEQ ID NO: 3034 - RNA, 22 nt, Homo sapiens
gacuauagaacuuucccccuca

SEQ ID NO: 3035 - RNA, 21 nt, Homo sapiens
agggggaaaguucuauagucc

SEQ ID NO: 3036 - RNA, 19 nt, Homo sapiens
agcugucugaaaaugucuu

SEQ ID NO: 3037 - RNA, 22 nt, Homo sapiens
gugagucucuaagaaaagagga

SEQ ID NO: 3038 - RNA, 21 nt, Homo sapiens
ucuaguaagaguggcagucga

SEQ ID NO: 3039 - RNA, 22 nt, Homo sapiens
augcugacauauuuacuagagg

SEQ ID NO: 3040 - RNA, 22 nt, Homo sapiens
guucucccaacguaagcccagc

SEQ ID NO: 3041 - RNA, 21 nt, Homo sapiens
uggguuuacguugggagaacu

SEQ ID NO: 3042 - RNA, 22 nt, Homo sapiens
aguauucuguaccagggaaggu

SEQ ID NO: 3043 - RNA, 21 nt, Homo sapiens
agaccuggcccagaccucagc

SEQ ID NO: 3044 - RNA, 19 nt, Homo sapiens
gugucugcuuccuguggga

SEQ ID NO: 3045 - RNA, 23 nt, Homo sapiens
cuaauaguaucuaccacaauaaa

SEQ ID NO: 3046 - RNA, 22 nt, Homo sapiens
aaccagcaccccaacuuuggac

SEQ ID NO: 3047 - RNA, 23 nt, Homo sapiens
acuugggcacugaaacaaugucc

SEQ ID NO: 3048 - RNA, 23 nt, Homo sapiens
ugugcuugcucgucccgcccgca

SEQ ID NO: 3049 - RNA, 24 nt, Homo sapiens
acugggggcuuucgggcucugcgu

SEQ ID NO: 3050 - RNA, 25 nt, Homo sapiens
agggaucgcgggcggguggcggccu

SEQ ID NO: 3051 - RNA, 23 nt, Homo sapiens
aucgcugcgguugcgagcgcugu

SEQ ID NO: 3052 - RNA, 21 nt, Homo sapiens
augauccaggaaccugccucu

SEQ ID NO: 3053 - RNA, 24 nt, Homo sapiens
aaagacauaggauagagucaccuc

SEQ ID NO: 3054 - RNA, 22 nt, Homo sapiens
agacacauuuggagagggaacc

SEQ ID NO: 3055 - RNA, 22 nt, Homo sapiens
gucccucuccaaaugugucuug

SEQ ID NO: 3056 - RNA, 22 nt, Homo sapiens
agacacauuuggagagggaccc

SEQ ID NO: 3057 - RNA, 22 nt, Homo sapiens
gguucccucuccaaaugugucu

SEQ ID NO: 3058 - RNA, 22 nt, Homo sapiens
acuuguaugcuagcucagguag

SEQ ID NO: 3059 - RNA, 19 nt, Homo sapiens
aguguggcuuucuuagagc

SEQ ID NO: 3060 - RNA, 19 nt, Homo sapiens
ucuaggcugguacugcuga

SEQ ID NO: 3061 - RNA, 19 nt, Homo sapiens
aagcagcugccucugaggc

SEQ ID NO: 3062 - RNA, 21 nt, Homo sapiens
guggcugcacucacuuccuuc

SEQ ID NO: 3063 - RNA, 19 nt, Homo sapiens
aagugugcagggcacuggu

SEQ ID NO: 3064 - RNA, 22 nt, Homo sapiens
aaaccuguguuguucaagaguc

SEQ ID NO: 3065 - RNA, 22 nt, Homo sapiens
agcaguguuuguuuugcccaca

SEQ ID NO: 3066 - RNA, 22 nt, Homo sapiens
ucgggcgcaagagcacugcagu

SEQ ID NO: 3067 - RNA, 21 nt, Homo sapiens
aggaggcagcgcucucaggac

SEQ ID NO: 3068 - RNA, 21 nt, Homo sapiens
acacuuguugggaugaccugc

SEQ ID NO: 3069 - RNA, 24 nt, Homo sapiens
aggagcuauccacuccaggugucc

SEQ ID NO: 3070 - RNA, 23 nt, Homo sapiens
ccagagcagccugcgguaacagu

SEQ ID NO: 3071 - RNA, 22 nt, Homo sapiens
aguugccagggcugccuuuggu

SEQ ID NO: 3072 - RNA, 21 nt, Homo sapiens
uagaccaucuuucuagaguau

SEQ ID NO: 3073 - RNA, 22 nt, Homo sapiens
agcucuagaaagauuguugacc

SEQ ID NO: 3074 - RNA, 21 nt, Homo sapiens
gggacuaggaugcagaccucc

SEQ ID NO: 3075 - RNA, 23 nt, Homo sapiens
aggucugcauucaaauccccaga

SEQ ID NO: 3076 - RNA, 20 nt, Homo sapiens
cauuacagcacagccauucu

SEQ ID NO: 3077 - RNA, 21 nt, Homo sapiens
ucuggcugugcuguaaugcag

SEQ ID NO: 3078 - RNA, 21 nt, Homo sapiens
ugacuucuaccucuuccaaag

SEQ ID NO: 3079 - RNA, 22 nt, Homo sapiens
uuggaauaggggauaucucagc

SEQ ID NO: 3080 - RNA, 22 nt, Homo sapiens
ucguaucagagauuccagacac

SEQ ID NO: 3081 - RNA, 23 nt, Homo sapiens
acugggaugucacugaauauggu

SEQ ID NO: 3082 - RNA, 22 nt, Homo sapiens
caaaguccuuccuauuuuuccc

SEQ ID NO: 3083 - RNA, 21 nt, Homo sapiens
gaagaauaggagggacuuugu

SEQ ID NO: 3084 - RNA, 22 nt, Homo sapiens
ugggccaugcauuucuagaacu

SEQ ID NO: 3085 - RNA, 21 nt, Homo sapiens
ucuagaaaugcaugacccacc

SEQ ID NO: 3086 - RNA, 22 nt, Homo sapiens
uuccacugccacuaccuaauuu

SEQ ID NO: 3087 - RNA, 21 nt, Homo sapiens
auuagguaguggcaguggaac

SEQ ID NO: 3088 - RNA, 22 nt, Homo sapiens
uuuaggauaagcuugacuuuug

SEQ ID NO: 3089 - RNA, 21 nt, Homo sapiens
caccgacucugucuccugcag

SEQ ID NO: 3090 - RNA, 22 nt, Homo sapiens
cagcaggggagagagaggaguc

SEQ ID NO: 3091 - RNA, 22 nt, Homo sapiens
ccucaccaucccuucugccugc

SEQ ID NO: 3092 - RNA, 23 nt, Homo sapiens
caggcagaaguggggcugacagg

SEQ ID NO: 3093 - RNA, 23 nt, Homo sapiens
ccucaccaccccuucugccugca

SEQ ID NO: 3094 - RNA, 24 nt, Homo sapiens
cugcaggcagaaguggggcugaca

SEQ ID NO: 3095 - RNA, 22 nt, Homo sapiens
uuccagcccuucuaaugguagg

SEQ ID NO: 3096 - RNA, 22 nt, Homo sapiens
uaccauuagaagagcuggaaga

SEQ ID NO: 3097 - RNA, 21 nt, Homo sapiens
ucaagugucaucugucccuag

SEQ ID NO: 3098 - RNA, 23 nt, Homo sapiens
uuugggauugacgccacaugucu

SEQ ID NO: 3099 - RNA, 21 nt, Homo sapiens
cugccuguucuuccacuccag

SEQ ID NO: 3100 - RNA, 23 nt, Homo sapiens
uauggaguggacuuucagcuggc

SEQ ID NO: 3101 - RNA, 20 nt, Homo sapiens
ucucuucaucuaccccccag

SEQ ID NO: 3102 - RNA, 21 nt, Homo sapiens
uuggaggguguggaagacauc

SEQ ID NO: 3103 - RNA, 21 nt, Homo sapiens
aauggcgccacuaggguugug

SEQ ID NO: 3104 - RNA, 25 nt, Homo sapiens
caacccuaggagagggugccauuca

SEQ ID NO: 3105 - RNA, 21 nt, Homo sapiens
guguugaaacaaucucuacug

SEQ ID NO: 3106 - RNA, 22 nt, Homo sapiens
uaugucugcugaccaucaccuu

SEQ ID NO: 3107 - RNA, 22 nt, Homo sapiens
uggugggccgcagaacaugugc

SEQ ID NO: 3108 - RNA, 22 nt, Homo sapiens
auaauacaugguuaaccucuuu

SEQ ID NO: 3109 - RNA, 21 nt, Homo sapiens
aauauuauacagucaaccucu

SEQ ID NO: 3110 - RNA, 23 nt, Homo sapiens
ggcagguucucacccucucuagg

SEQ ID NO: 3111 - RNA, 25 nt, Homo sapiens
ggcggagggaaguagguccguuggu

SEQ ID NO: 3112 - RNA, 22 nt, Homo sapiens
cuugguucagggagggucccca

SEQ ID NO: 3113 - RNA, 22 nt, Homo sapiens
aggaccuucccugaaccaagga

SEQ ID NO: 3114 - RNA, 21 nt, Homo sapiens
accuccugugugcauggauua

SEQ ID NO: 3115 - RNA, 22 nt, Homo sapiens
uacccauugcauaucggaguug

SEQ ID NO: 3116 - RNA, 24 nt, Homo sapiens
ugccugggucucuggccugcgcgu

SEQ ID NO: 3117 - RNA, 21 nt, Homo sapiens
ucccacguuguggcccagcag

SEQ ID NO: 3118 - RNA, 22 nt, Homo sapiens
aggcggggcgccgcgggaccgc

SEQ ID NO: 3119 - RNA, 22 nt, Homo sapiens
gguggcccggccgugccugagg

SEQ ID NO: 3120 - RNA, 23 nt, Homo sapiens
uauucauuuauccccagccuaca

SEQ ID NO: 3121 - RNA, 24 nt, Homo sapiens
acuggcuagggaaaaugauuggau

SEQ ID NO: 3122 - RNA, 22 nt, Homo sapiens
uucauuugccucccagccuaca

SEQ ID NO: 3123 - RNA, 24 nt, Homo sapiens
ugggcuaagggagaugauugggua

SEQ ID NO: 3124 - RNA, 20 nt, Homo sapiens
accaggaggcugaggccccu

SEQ ID NO: 3125 - RNA, 23 nt, Homo sapiens
ugucacucggcucggcccacuac

SEQ ID NO: 3126 - RNA, 20 nt, Homo sapiens
gucccugaguguauguggug

SEQ ID NO: 3127 - RNA, 21 nt, Homo sapiens
uccgguucucagggcuccacc

SEQ ID NO: 3128 - RNA, 21 nt, Homo sapiens
ccaaaccagucgugccugugg

SEQ ID NO: 3129 - RNA, 22 nt, Homo sapiens
cucaaaccggcugugccugugg

SEQ ID NO: 3130 - RNA, 21 nt, Homo sapiens
acaggcacgacugguuuggca

SEQ ID NO: 3131 - RNA, 23 nt, Homo sapiens
aggaagcccuggaggggcuggag

SEQ ID NO: 3132 - RNA, 22 nt, Homo sapiens
uccgaacucuccauuccucugc

SEQ ID NO: 3133 - RNA, 20 nt, Homo sapiens
ugggaauggggguaagggcc

SEQ ID NO: 3134 - RNA, 22 nt, Homo sapiens
aggcgauguggggauguagaga

SEQ ID NO: 3135 - RNA, 21 nt, Homo sapiens
uaguggucagagggcuuauga

SEQ ID NO: 3136 - RNA, 22 nt, Homo sapiens
ucugacaucagugauucuccug

SEQ ID NO: 3137 - RNA, 22 nt, Homo sapiens
cgcgccugcaggaacugguaga

SEQ ID NO: 3138 - RNA, 23 nt, Homo sapiens
ugggcaggggcuuauuguaggag

SEQ ID NO: 3139 - RNA, 22 nt, Homo sapiens
ugcaggggucgggugggccagg

SEQ ID NO: 3140 - RNA, 20 nt, Homo sapiens
aggcgcacccgaccacaugc

SEQ ID NO: 3141 - RNA, 22 nt, Homo sapiens
auaguccgaguaacgucggggc

SEQ ID NO: 3142 - RNA, 23 nt, Homo sapiens
cugggcccgcggcgggcgugggg

SEQ ID NO: 3143 - RNA, 20 nt, Homo sapiens
cuguaugcccucaccgcuca

SEQ ID NO: 3144 - RNA, 23 nt, Homo sapiens
uggugcggagagggcccacagug

SEQ ID NO: 3145 - RNA, 21 nt, Homo sapiens
cuguccuaagguuguugaguu

SEQ ID NO: 3146 - RNA, 21 nt, Homo sapiens
ucuucaaccucaggacuugca

SEQ ID NO: 3147 - RNA, 22 nt, Homo sapiens
caacuagacugugagcuucuag

SEQ ID NO: 3148 - RNA, 23 nt, Homo sapiens
aaggagcuuacaaucuagcuggg

SEQ ID NO: 3149 - RNA, 22 nt, Homo sapiens
gggacccagggagagacguaag

SEQ ID NO: 3150 - RNA, 22 nt, Homo sapiens
caacaaaucacagucugccaua

SEQ ID NO: 3151 - RNA, 21 nt, Homo sapiens
cuuccgccccgccgggcgucg

SEQ ID NO: 3152 - RNA, 22 nt, Homo sapiens
caacaaaucccagucuaccuaa

SEQ ID NO: 3153 - RNA, 22 nt, Homo sapiens
cuguugccacuaaccucaaccu

SEQ ID NO: 3154 - RNA, 22 nt, Homo sapiens
ugcggggcuagggcuaacagca

SEQ ID NO: 3155 - RNA, 22 nt, Homo sapiens
uuugugaccugguccacuaacc

SEQ ID NO: 3156 - RNA, 22 nt, Homo sapiens
gaugguugaccagagagcacac

SEQ ID NO: 3157 - RNA, 22 nt, Homo sapiens
gcagagugcaaacaauuuugac

SEQ ID NO: 3158 - RNA, 23 nt, Homo sapiens
uggaagacuagugauuuuguugu

SEQ ID NO: 3159 - RNA, 20 nt, Homo sapiens
cggcucugggucugugggga

SEQ ID NO: 3160 - RNA, 22 nt, Homo sapiens
gcagcagggugaaacugacaca

SEQ ID NO: 3161 - RNA, 22 nt, Homo sapiens
ggggcuggggccggggccgagc

SEQ ID NO: 3162 - RNA, 22 nt, Homo sapiens
gcaggugcucacuuguccuccu

SEQ ID NO: 3163 - RNA, 21 nt, Homo sapiens
uggaggagaaggaaggugaug

SEQ ID NO: 3164 - RNA, 22 nt, Homo sapiens
acuccagccccacagccucagc

SEQ ID NO: 3165 - RNA, 22 nt, Homo sapiens
aggaggaauuggugcuggucuu

SEQ ID NO: 3166 - RNA, 23 nt, Homo sapiens
ucugcucauaccccaugguuucu

SEQ ID NO: 3167 - RNA, 23 nt, Homo sapiens
ugcaccaugguugucugagcaug

SEQ ID NO: 3168 - RNA, 23 nt, Homo sapiens
cugggaucuccggggucuugguu

SEQ ID NO: 3169 - RNA, 22 nt, Homo sapiens
ugagaccucuggguucugagcu

SEQ ID NO: 3170 - RNA, 23 nt, Homo sapiens
uccaguaccacgugucagggcca

SEQ ID NO: 3171 - RNA, 23 nt, Homo sapiens
caguaacaaagauucauccuugu

SEQ ID NO: 3172 - RNA, 22 nt, Homo sapiens
ggagacugaugaguucccggga

SEQ ID NO: 3173 - RNA, 21 nt, Homo sapiens
gcaggaacuugugagucuccu

SEQ ID NO: 3174 - RNA, 22 nt, Homo sapiens
cugcccuggcccgagggaccga

SEQ ID NO: 3175 - RNA, 21 nt, Homo sapiens
ccuggaaacacugagguugug

SEQ ID NO: 3176 - RNA, 22 nt, Homo sapiens
uauaccucaguuuuaucaggug

SEQ ID NO: 3177 - RNA, 22 nt, Homo sapiens
uggugguuuacaaaguaauuca

SEQ ID NO: 3178 - RNA, 22 nt, Homo sapiens
uggauuucuuugugaaucacca

SEQ ID NO: 3179 - RNA, 21 nt, Homo sapiens
uccucuucucccuccucccag

SEQ ID NO: 3180 - RNA, 20 nt, Homo sapiens
guagaggagauggcgcaggg

SEQ ID NO: 3181 - RNA, 22 nt, Homo sapiens
aggcagcgggguguaguggaua

SEQ ID NO: 3182 - RNA, 22 nt, Homo sapiens
uccauuacacuacccugccucu

SEQ ID NO: 3183 - RNA, 22 nt, Homo sapiens
gugaacgggcgccaucccgagg

SEQ ID NO: 3184 - RNA, 22 nt, Homo sapiens
gacugacaccucuuugggugaa

SEQ ID NO: 3185 - RNA, 21 nt, Homo sapiens
uacucaaaaagcugucaguca

SEQ ID NO: 3186 - RNA, 21 nt, Homo sapiens
uuaauaucggacaaccauugu

SEQ ID NO: 3187 - RNA, 21 nt, Homo sapiens
uacuuggaaaggcaucaguug

SEQ ID NO: 3188 - RNA, 22 nt, Homo sapiens
ugcaacgaaccugagccacuga

SEQ ID NO: 3189 - RNA, 22 nt, Homo sapiens
ugcaacuuaccugagucauuga

SEQ ID NO: 3190 - RNA, 21 nt, Homo sapiens
cacuguguccuuucugcguag

SEQ ID NO: 3191 - RNA, 22 nt, Homo sapiens
cacuggcuccuuucuggguaga

SEQ ID NO: 3192 - RNA, 22 nt, Homo sapiens
cacuguuuccuuucugagugga

SEQ ID NO: 3193 - RNA, 21 nt, Homo sapiens
uauucagaaaggugccaguca

SEQ ID NO: 3194 - RNA, 20 nt, Homo sapiens
ggggagcuguggaagcagua

SEQ ID NO: 3195 - RNA, 25 nt, Homo sapiens
cuagugagggacagaaccaggauuc

SEQ ID NO: 3196 - RNA, 23 nt, Homo sapiens
gcagcagagaauaggacuacguc

SEQ ID NO: 3197 - RNA, 20 nt, Homo sapiens
agagucuugugaugucuugc

SEQ ID NO: 3198 - RNA, 23 nt, Homo sapiens
agguugggaucgguugcaaugcu

SEQ ID NO: 3199 - RNA, 22 nt, Homo sapiens
ggguggggauuuguugcauuac

SEQ ID NO: 3200 - RNA, 22 nt, Homo sapiens
uauugcacuugucccggccugu

SEQ ID NO: 3201 - RNA, 22 nt, Homo sapiens
uauugcacucgucccggccucc

SEQ ID NO: 3202 - RNA, 22 nt, Homo sapiens
agggacgggacgcggugcagug

SEQ ID NO: 3203 - RNA, 22 nt, Homo sapiens
ugugcgcagggagaccucuccc

SEQ ID NO: 3204 - RNA, 22 nt, Homo sapiens
acugcugagcuagcacuucccg

SEQ ID NO: 3205 - RNA, 22 nt, Homo sapiens
ugucuacuacuggagacacugg

SEQ ID NO: 3206 - RNA, 23 nt, Homo sapiens
ccaguuaccgcuuccgcuaccgc

SEQ ID NO: 3207 - RNA, 23 nt, Homo sapiens
caaagugcuguucgugcagguag

SEQ ID NO: 3208 - RNA, 22 nt, Homo sapiens
acaguagagggaggaaucgcag

SEQ ID NO: 3209 - RNA, 22 nt, Homo sapiens
auccgcgcucugacucucugcc

SEQ ID NO: 3210 - RNA, 20 nt, Homo sapiens
gugagucaggguggggcugg

SEQ ID NO: 3211 - RNA, 22 nt, Homo sapiens
ugcccuuaaaggugaacccagu

SEQ ID NO: 3212 - RNA, 21 nt, Homo sapiens
cccugggccucugcuccccag

SEQ ID NO: 3213 - RNA, 24 nt, Homo sapiens
uggggagcugaggcucugggggug

SEQ ID NO: 3214 - RNA, 22 nt, Homo sapiens
auaaagcuagauaaccgaaagu

SEQ ID NO: 3215 - RNA, 21 nt, Homo sapiens
aaggcagggcccccgcucccc

SEQ ID NO: 3216 - RNA, 23 nt, Homo sapiens
cacccggcugugugcacaugugc

SEQ ID NO: 3217 - RNA, 22 nt, Homo sapiens
ucuucucuguuuuggccaugug

SEQ ID NO: 3218 - RNA, 21 nt, Homo sapiens
cugacuguugccguccuccag

SEQ ID NO: 3219 - RNA, 22 nt, Homo sapiens
aaauuauuguacaucggaugag

SEQ ID NO: 3220 - RNA, 22 nt, Homo sapiens
uucaacggguauuuauugagca

SEQ ID NO: 3221 - RNA, 23 nt, Homo sapiens
ucuuugguuaucuagcuguauga

SEQ ID NO: 3222 - RNA, 22 nt, Homo sapiens
aaucaugugcagugccaauaug

SEQ ID NO: 3223 - RNA, 23 nt, Homo sapiens
uuuggcacuagcacauuuuugcu

SEQ ID NO: 3224 - RNA, 22 nt, Homo sapiens
cuauacaacuuacuacuuuccc

SEQ ID NO: 3225 - RNA, 22 nt, Homo sapiens
ugagguaguaaguuguauuguu

SEQ ID NO: 3226 - RNA, 22 nt, Homo sapiens
caagcucgcuucuaugggucug

SEQ ID NO: 3227 - RNA, 22 nt, Homo sapiens
aacccguagauccgaucuugug

SEQ ID NO: 3228 - RNA, 22 nt, Homo sapiens
caagcucgugucuguggguccg

SEQ ID NO: 3229 - RNA, 22 nt, Homo sapiens
cacccguagaaccgaccuugcg

SEQ ID NO: 3230 - RNA, 22 nt, Homo sapiens
uuaaaccucuacuaaguuccca

SEQ ID NO: 3231 - RNA, 18 nt, Homo sapiens
aaaacaacaccccccacc

SEQ ID NO: 3232 - RNA, 22 nt, Homo sapiens
uacuuguaacggagagcacuag

SEQ ID NO: 3233 - RNA, 22 nt, Homo sapiens
uuagccucaugaccagccacaa

SEQ ID NO: 3234 - RNA, 21 nt, Homo sapiens
ugugucugaucaugagacuaa

SEQ ID NO: 3235 - RNA, 22 nt, Homo sapiens
auaaugaaugcuuggucccuug

SEQ ID NO: 3236 - RNA, 22 nt, Homo sapiens
gccugucccuaaauccuuccug

SEQ ID NO: 3237 - RNA, 22 nt, Homo sapiens
gaaucacaaauguccuuaauag

SEQ ID NO: 3238 - RNA, 22 nt, Homo sapiens
aucaaucacaaauguccuuaau

SEQ ID NO: 3239 - RNA, 17 nt, Homo sapiens
cuccucagcucagccuc

SEQ ID NO: 3240 - RNA, 22 nt, Homo sapiens
cugcuccgagcacggccgcgcg

SEQ ID NO: 3241 - RNA, 22 nt, Homo sapiens
augggacauccuacauaugcaa

SEQ ID NO: 3242 - RNA, 21 nt, Homo sapiens
uaaaguaacuuccacuuggcu

SEQ ID NO: 3243 - RNA, 17 nt, Homo sapiens
aaccaccagcccacucc

SEQ ID NO: 3244 - RNA, 22 nt, Homo sapiens
gagccccacugagaaauagaaa

SEQ ID NO: 3245 - RNA, 22 nt, Homo sapiens
cauuuccauagcccacuggguu

SEQ ID NO: 3246 - RNA, 17 nt, Homo sapiens
caacaacagaccacccc

SEQ ID NO: 3247 - RNA, 20 nt, Homo sapiens
uggggcuucucccgccuuuu

SEQ ID NO: 3248 - RNA, 20 nt, Homo sapiens
uuaggguaccgcggccguua

SEQ ID NO: 3249 - RNA, 17 nt, Homo sapiens
ugccagccucgcccagc

SEQ ID NO: 3250 - RNA, 19 nt, Homo sapiens
cugcccuucagccagcucu

SEQ ID NO: 3251 - RNA, 18 nt, Homo sapiens
cgccggagcccgcccccu

SEQ ID NO: 3252 - RNA, 21 nt, Homo sapiens
cguccugcaucacuagcccca

SEQ ID NO: 3253 - RNA, 22 nt, Homo sapiens
uaugcccaaaucucuuaccaga

SEQ ID NO: 3254 - RNA, 22 nt, Homo sapiens
uuuggucacaccaguccacauu

SEQ ID NO: 3255 - RNA, 17 nt, Homo sapiens
ggcgcgcgcccagcccc

SEQ ID NO: 3256 - RNA, 21 nt, Homo sapiens
acagagauggaaaggccuucu

SEQ ID NO: 3257 - RNA, 22 nt, Homo sapiens
ccucuggucagccacagucugg

SEQ ID NO: 3258 - RNA, 21 nt, Homo sapiens
agcaaaaagccuguuuacauu

SEQ ID NO: 3259 - RNA, 22 nt, Homo sapiens
cccucucagcuucaguuuccuc

SEQ ID NO: 3260 - RNA, 17 nt, Homo sapiens
gcccagccgucccggag

SEQ ID NO: 3261 - RNA, 22 nt, Homo sapiens
cagcacuugcccugccagccca

SEQ ID NO: 3262 - RNA, 17 nt, Homo sapiens
ucccuccucucagucuu

SEQ ID NO: 3263 - RNA, 22 nt, Homo sapiens
accagcuaacaauacacugcca

SEQ ID NO: 3264 - RNA, 22 nt, Homo sapiens
aguggcaggguaguuguggcug

SEQ ID NO: 3265 - RNA, 22 nt, Homo sapiens
gccagcuaacaauacacugccu

SEQ ID NO: 3266 - RNA, 23 nt, Homo sapiens
acagagaggagugcaacuagcaa

SEQ ID NO: 3267 - RNA, 25 nt, Homo sapiens
acagccgcuagcaauacacugccua

SEQ ID NO: 3268 - RNA, 17 nt, Homo sapiens
aagaaacuacuaccuca

SEQ ID NO: 3269 - RNA, 21 nt, Homo sapiens
ugauucauccgaggucacaua

SEQ ID NO: 3270 - RNA, 22 nt, Homo sapiens
cuucagcaccaucaucaucagc

SEQ ID NO: 3271 - RNA, 22 nt, Homo sapiens
uaaauucuauuuccugcuuaaa

SEQ ID NO: 3272 - RNA, 22 nt, Homo sapiens
cauguucaucucuauugucaca

SEQ ID NO: 3273 - RNA, 18 nt, Homo sapiens
uccgucccagcccagccu

SEQ ID NO: 3274 - RNA, 20 nt, Homo sapiens
uugccucagaccacccauuu

SEQ ID NO: 3275 - RNA, 20 nt, Homo sapiens
cccagcccagcccaacccag

SEQ ID NO: 3276 - RNA, 17 nt, Homo sapiens
cgcgcgcccagccccgc

SEQ ID NO: 3277 - RNA, 22 nt, Homo sapiens
aaaaccuucuauauccuuuagu

SEQ ID NO: 3278 - RNA, 22 nt, Homo sapiens
augaaugcaaaauguccccaau

SEQ ID NO: 3279 - RNA, 22 nt, Homo sapiens
auauuaggaacacaucgcaaaa

SEQ ID NO: 3280 - RNA, 22 nt, Homo sapiens
uauggaugcaaaaugaucccaa

SEQ ID NO: 3281 - RNA, 22 nt, Homo sapiens
uauucaggaacauauugcaaaa

SEQ ID NO: 3282 - RNA, 22 nt, Homo sapiens
aaccauacauccuacucccuca

SEQ ID NO: 3283 - RNA, 22 nt, Homo sapiens
agggcaaaugcaacaguucuuc

SEQ ID NO: 3284 - RNA, 22 nt, Homo sapiens
ugggcgauacagugaggcccug

SEQ ID NO: 3285 - RNA, 22 nt, Homo sapiens
augggccuccagccgucagucu

SEQ ID NO: 3286 - RNA, 18 nt, Homo sapiens
uuccccaauccugccugu

SEQ ID NO: 3287 - RNA, 22 nt, Homo sapiens
gggcugccgggaguccaguccu

SEQ ID NO: 3288 - RNA, 17 nt, Homo sapiens
gccccgacccuucuccc

SEQ ID NO: 3289 - RNA, 25 nt, Homo sapiens
cucagcugugaguuucaucauauuu

SEQ ID NO: 3290 - RNA, 26 nt, Homo sapiens
ucucagcacaguuaucaucccugagc

SEQ ID NO: 3291 - RNA, 18 nt, Homo sapiens
cagcccugcgcacugcug

SEQ ID NO: 3292 - RNA, 22 nt, Homo sapiens
aacucaguaaugguaacgguuu

SEQ ID NO: 3293 - RNA, 22 nt, Homo sapiens
aaugguaaugguucucuugcua

SEQ ID NO: 3294 - RNA, 22 nt, Homo sapiens
uuccugcguguuuucuguccaa

SEQ ID NO: 3295 - RNA, 20 nt, Homo sapiens
uuggacagaaaacacgcagg

SEQ ID NO: 3296 - RNA, 22 nt, Homo sapiens
accugcguguuuucuguccaaa

SEQ ID NO: 3297 - RNA, 20 nt, Homo sapiens
uuggacagaaaacacgcagg

SEQ ID NO: 3298 - RNA, 22 nt, Homo sapiens
cugagcacaggacuuccuuagc

SEQ ID NO: 3299 - RNA, 21 nt, Homo sapiens
accggccuacaggcagaguca

SEQ ID NO: 3300 - RNA, 21 nt, Homo sapiens
acagccgaggcccucucgguc

SEQ ID NO: 3301 - RNA, 22 nt, Homo sapiens
cacuuacuucuuugcagaugag

SEQ ID NO: 3302 - RNA, 22 nt, Homo sapiens
auagcagcauaagccugucuca

SEQ ID NO: 3303 - RNA, 22 nt, Homo sapiens
ugagacagguucaugcugcuau

SEQ ID NO: 3304 - RNA, 20 nt, Homo sapiens
uagcagcaugaaccugucuc

SEQ ID NO: 3305 - RNA, 21 nt, Homo sapiens
gagacaggcuuaugcugcuau

SEQ ID NO: 3306 - RNA, 21 nt, Homo sapiens
aaccagcaugcacaucccccc

SEQ ID NO: 3307 - RNA, 22 nt, Homo sapiens
ucaguuuccucugcaaacaguu

SEQ ID NO: 3308 - RNA, 22 nt, Homo sapiens
agcggccagcccugcugucagc

SEQ ID NO: 3309 - RNA, 22 nt, Homo sapiens
acagucaucucuuugcagacca

SEQ ID NO: 3310 - RNA, 22 nt, Homo sapiens
guccagaucauacauauaauga

SEQ ID NO: 3311 - RNA, 21 nt, Homo sapiens
acgggccaucagcaguccaau

SEQ ID NO: 3312 - RNA, 22 nt, Homo sapiens
uucauuggacugcugauggccu

SEQ ID NO: 3313 - RNA, 18 nt, Homo sapiens
cgcucccguccugcuggg

SEQ ID NO: 3314 - RNA, 17 nt, Homo sapiens
ucagaagccuucuccau

SEQ ID NO: 3315 - RNA, 17 nt, Homo sapiens
cgccgggcuccccgggg

SEQ ID NO: 3316 - RNA, 22 nt, Homo sapiens
agcguccggcaaccuccuucca

SEQ ID NO: 3317 - RNA, 17 nt, Homo sapiens
agaccccuccuccaucc

SEQ ID NO: 3318 - RNA, 17 nt, Homo sapiens
gucccagccagguccac

SEQ ID NO: 3319 - RNA, 21 nt, Homo sapiens
augugguagauauaugcacga

SEQ ID NO: 3320 - RNA, 21 nt, Homo sapiens
aucgugcauauaucuaccaca

SEQ ID NO: 3321 - RNA, 22 nt, Homo sapiens
cagcuaagcucagcucggcuca

SEQ ID NO: 3322 - RNA, 22 nt, Homo sapiens
ucagcccagcucauccaagcuc

SEQ ID NO: 3323 - RNA, 22 nt, Homo sapiens
gcccagcucagcccaguucagc

SEQ ID NO: 3324 - RNA, 21 nt, Homo sapiens
uaaaccuacaggcaggacuaa

SEQ ID NO: 3325 - RNA, 23 nt, Homo sapiens
acccuauaagcaauauugcacua

SEQ ID NO: 3326 - RNA, 22 nt, Homo sapiens
gcagagacaauauugauagggu

SEQ ID NO: 3327 - RNA, 21 nt, Homo sapiens
guguauaugcccauggacugc

SEQ ID NO: 3328 - RNA, 22 nt, Homo sapiens
cgauguaguccaaaggcacaua

SEQ ID NO: 3329 - RNA, 22 nt, Homo sapiens
cuagagcagcgagagggcggca

SEQ ID NO: 3330 - RNA, 23 nt, Homo sapiens
uccgccacacccacgcugcccuc

SEQ ID NO: 3331 - RNA, 22 nt, Homo sapiens
ugcauaugccuggcuagcuccu

SEQ ID NO: 3332 - RNA, 20 nt, Homo sapiens
gaggagcuagccaggcauau

SEQ ID NO: 3333 - RNA, 19 nt, Homo sapiens
ccccgggccggucgcgccg

SEQ ID NO: 3334 - RNA, 21 nt, Homo sapiens
uugcggguucugacuucaaga

SEQ ID NO: 3335 - RNA, 22 nt, Homo sapiens
cuaaaggcuuugaacacgaguu

SEQ ID NO: 3336 - RNA, 22 nt, Homo sapiens
ucacuugaaucugcaguuagua

SEQ ID NO: 3337 - RNA, 23 nt, Homo sapiens
cggccggcugagcgguguccagg

SEQ ID NO: 3338 - RNA, 21 nt, Homo sapiens
acuuguccaccgcagccgagu

SEQ ID NO: 3339 - RNA, 20 nt, Homo sapiens
gcaaagcaaggugagaguga

SEQ ID NO: 3340 - RNA, 22 nt, Homo sapiens
ucaaucucagccuacuuagcaa

SEQ ID NO: 3341 - RNA, 22 nt, Homo sapiens
gugggccaggaaacagggggug

SEQ ID NO: 3342 - RNA, 23 nt, Homo sapiens
cccaccagcugcucccuggccca

SEQ ID NO: 3343 - RNA, 24 nt, Homo sapiens
ugaggcaaaaguauggcaugggca

SEQ ID NO: 3344 - RNA, 22 nt, Homo sapiens
agccaccaggggacgaugccau

SEQ ID NO: 3345 - RNA, 22 nt, Homo sapiens
uuagcauuuauggucauguguc

SEQ ID NO: 3346 - RNA, 23 nt, Homo sapiens
cuucugucucuuuucucucucca

SEQ ID NO: 3347 - RNA, 22 nt, Homo sapiens
aaccaggcaagaacuacugucu

SEQ ID NO: 3348 - RNA, 19 nt, Homo sapiens
acaauauuucuugccuggu

SEQ ID NO: 3349 - RNA, 21 nt, Homo sapiens
cugggaagggagagggacaau

SEQ ID NO: 3350 - RNA, 22 nt, Homo sapiens
ucccucagcuccucuucccagu

SEQ ID NO: 3351 - RNA, 23 nt, Homo sapiens
uuccucagcacagcaccaucuuc

SEQ ID NO: 3352 - RNA, 20 nt, Homo sapiens
cucccauuugcagucccaca

SEQ ID NO: 3353 - RNA, 21 nt, Homo sapiens
uggggagaggcaggccucaga

SEQ ID NO: 3354 - RNA, 24 nt, Homo sapiens
cucugagagcccaccccucgccca

SEQ ID NO: 3355 - RNA, 21 nt, Homo sapiens
augucaggccucauucuaccu

SEQ ID NO: 3356 - RNA, 19 nt, Homo sapiens
aagguagaaagaggccuga

SEQ ID NO: 3357 - RNA, 20 nt, Homo sapiens
gcccgaccucacccaccccg

SEQ ID NO: 3358 - RNA, 22 nt, Homo sapiens
ugaggggauggguuaacagaac

SEQ ID NO: 3359 - RNA, 22 nt, Homo sapiens
uaguucuauuaaccaguccccu

SEQ ID NO: 3360 - RNA, 23 nt, Homo sapiens
ucuccaagcaacccuuaacucca

SEQ ID NO: 3361 - RNA, 22 nt, Homo sapiens
gguguuaagccuugcucagaga

SEQ ID NO: 3362 - RNA, 22 nt, Homo sapiens
ccagaugccuccagaucccaca

SEQ ID NO: 3363 - RNA, 21 nt, Homo sapiens
ccccggggaccugacgagggu

SEQ ID NO: 3364 - RNA, 22 nt, Homo sapiens
cgacccucugccauccccggug

SEQ ID NO: 3365 - RNA, 23 nt, Homo sapiens
acaggccuccugcccucagccca

SEQ ID NO: 3366 - RNA, 23 nt, Homo sapiens
augccucagaccacuuccacauu

SEQ ID NO: 3367 - RNA, 23 nt, Homo sapiens
auuccuccaggauccacacucac

SEQ ID NO: 3368 - RNA, 22 nt, Homo sapiens
cguugccaugucuaagaagaaa

SEQ ID NO: 3369 - RNA, 22 nt, Homo sapiens
guuuucuucuuagacauggcag

SEQ ID NO: 3370 - RNA, 22 nt, Homo sapiens
agcugccaugucuaagaagaaa

SEQ ID NO: 3371 - RNA, 19 nt, Homo sapiens
uucuucuuagacauggcaa

SEQ ID NO: 3372 - RNA, 23 nt, Homo sapiens
auguguguugcguguauguguau

SEQ ID NO: 3373 - RNA, 23 nt, Homo sapiens
cuccauuuuccaccagagcugca

SEQ ID NO: 3374 - RNA, 22 nt, Homo sapiens
uggacuagcucuguggauccug

SEQ ID NO: 3375 - RNA, 22 nt, Homo sapiens
gucaggauccacagagcuaguu

SEQ ID NO: 3376 - RNA, 22 nt, Homo sapiens
auuuagccaauugucuaucuuu

SEQ ID NO: 3377 - RNA, 22 nt, Homo sapiens
cuaaagauggacaauuggcuaa

SEQ ID NO: 3378 - RNA, 22 nt, Homo sapiens
auuuagccaauuguccaucuuu

SEQ ID NO: 3379 - RNA, 24 nt, Homo sapiens
acugcacguccauggagcucagcu

SEQ ID NO: 3380 - RNA, 22 nt, Homo sapiens
gacggggcucacagaccggaag

SEQ ID NO: 3381 - RNA, 22 nt, Homo sapiens
aacuugcggagugggcacccca

SEQ ID NO: 3382 - RNA, 26 nt, Homo sapiens
ggcgggggcuacgcgccgcggccgag

SEQ ID NO: 3383 - RNA, 23 nt, Homo sapiens
gcucgcgcucacgcgucccccag

SEQ ID NO: 3384 - RNA, 21 nt, Homo sapiens
aaauacaugucagauuguaug

SEQ ID NO: 3385 - RNA, 21 nt, Homo sapiens
ggcauacaaucugacauguau

SEQ ID NO: 3386 - RNA, 23 nt, Homo sapiens
gggaauuacaaucugacaugcaa

SEQ ID NO: 3387 - RNA, 21 nt, Homo sapiens
cuguggggacagaaggaggga

SEQ ID NO: 3388 - RNA, 22 nt, Homo sapiens
gguucuccuucugcuccccagu

SEQ ID NO: 3389 - RNA, 23 nt, Homo sapiens
cuggaaaaacaaaaaggauuuuc

SEQ ID NO: 3390 - RNA, 23 nt, Homo sapiens
gacaaauccuuuuuuuuuucccu

SEQ ID NO: 3391 - RNA, 22 nt, Homo sapiens
ccuccuccacuucccggacaca

SEQ ID NO: 3392 - RNA, 22 nt, Homo sapiens
aagcgaccaugauguaacuuca

SEQ ID NO: 3393 - RNA, 22 nt, Homo sapiens
ugaaguuacaucauggucgcuu

SEQ ID NO: 3394 - RNA, 21 nt, Homo sapiens
agaccaaagacuaugcacuaa

SEQ ID NO: 3395 - RNA, 22 nt, Homo sapiens
agauuagcgcacagucuucggu

SEQ ID NO: 3396 - RNA, 21 nt, Homo sapiens
ugccucuguccagcuguguaa

SEQ ID NO: 3397 - RNA, 22 nt, Homo sapiens
uccaguccggcuccugccugga

SEQ ID NO: 3398 - RNA, 21 nt, Homo sapiens
agccgcgcgucccgagcccag

SEQ ID NO: 3399 - RNA, 22 nt, Homo sapiens
ccugcuggucaaucacagcccc

SEQ ID NO: 3400 - RNA, 22 nt, Homo sapiens
aagagccaguggugaaacagug

SEQ ID NO: 3401 - RNA, 21 nt, Homo sapiens
ucacugucucaccacuggcuc

SEQ ID NO: 3402 - RNA, 22 nt, Homo sapiens
aguaguucuuuggucucacaga

SEQ ID NO: 3403 - RNA, 22 nt, Homo sapiens
uggcugaaagaccaaagaacaa

SEQ ID NO: 3404 - RNA, 22 nt, Homo sapiens
ucauaagucugaacaauaccuu

SEQ ID NO: 3405 - RNA, 22 nt, Homo sapiens
agcaaagaaucucuaucacaga

SEQ ID NO: 3406 - RNA, 21 nt, Homo sapiens
uaacaacucuuacaauucaga

SEQ ID NO: 3407 - RNA, 23 nt, Homo sapiens
acaucuaagacugcaagaguucu

SEQ ID NO: 3408 - RNA, 22 nt, Homo sapiens
agauacagccugcauucccguu

SEQ ID NO: 3409 - RNA, 23 nt, Homo sapiens
agaccaggcuccaggaacucaga

SEQ ID NO: 3410 - RNA, 23 nt, Homo sapiens
aucgggcgagcacuggaucucca

SEQ ID NO: 3411 - RNA, 22 nt, Homo sapiens
acgucuccaccgacuugcaaca

SEQ ID NO: 3412 - RNA, 22 nt, Homo sapiens
uauguugcaagucaguagagag

SEQ ID NO: 3413 - RNA, 22 nt, Homo sapiens
cuagccagggcaggaagggaga

SEQ ID NO: 3414 - RNA, 26 nt, Homo sapiens
aaccuugccccacuccaagcccuggg

SEQ ID NO: 3415 - RNA, 23 nt, Homo sapiens
aacaccagaaagcccagcagaua

SEQ ID NO: 3416 - RNA, 21 nt, Homo sapiens
gccugcccccuccaacagcca

SEQ ID NO: 3417 - RNA, 22 nt, Homo sapiens
uuugggugcgggaggagggcug

SEQ ID NO: 3418 - RNA, 22 nt, Homo sapiens
cccagguccucugcugccccua

SEQ ID NO: 3419 - RNA, 22 nt, Homo sapiens
ggcccccaccaugucuccucaa

SEQ ID NO: 3420 - RNA, 21 nt, Homo sapiens
cagaggccucagcugggcugc

SEQ ID NO: 3421 - RNA, 22 nt, Homo sapiens
uucagcccagccucgccugcuc

SEQ ID NO: 3422 - RNA, 23 nt, Homo sapiens
augcacucucaguccguggcugg

SEQ ID NO: 3423 - RNA, 23 nt, Homo sapiens
ccgcagcucauggccuggaggac

SEQ ID NO: 3424 - RNA, 22 nt, Homo sapiens
aucugauacccacacugccuga

SEQ ID NO: 3425 - RNA, 23 nt, Homo sapiens
aaauacugugaauuccacucuca

SEQ ID NO: 3426 - RNA, 23 nt, Homo sapiens
ugugacagugaaauucacaguau

SEQ ID NO: 3427 - RNA, 21 nt, Homo sapiens
agguguuauccuguccauuug

SEQ ID NO: 3428 - RNA, 22 nt, Homo sapiens
gcaaauggauaggauaacaccu

SEQ ID NO: 3429 - RNA, 22 nt, Homo sapiens
gaaggaggcagcggugagauca

SEQ ID NO: 3430 - RNA, 22 nt, Homo sapiens
ccugcucgcccacugccuccug

SEQ ID NO: 3431 - RNA, 22 nt, Homo sapiens
agaugacaguauccgucuugca

SEQ ID NO: 3432 - RNA, 24 nt, Homo sapiens
accaaggggcaggagucacugaca

SEQ ID NO: 3433 - RNA, 22 nt, Homo sapiens
cacgucagugacugcgcccccu

SEQ ID NO: 3434 - RNA, 23 nt, Homo sapiens
uggggucuuccucuacauuuuga

SEQ ID NO: 3435 - RNA, 22 nt, Homo sapiens
ggagaagauugcagaguaaauu

SEQ ID NO: 3436 - RNA, 22 nt, Homo sapiens
ggaacuuacucugcaaucuucu

SEQ ID NO: 3437 - RNA, 26 nt, Homo sapiens
cacuggggugaggagucaguccugug

SEQ ID NO: 3438 - RNA, 22 nt, Homo sapiens
acacacuguccucauccccaga

SEQ ID NO: 3439 - RNA, 20 nt, Homo sapiens
acaccacacccaucacccau

SEQ ID NO: 3440 - RNA, 22 nt, Homo sapiens
aagggguaggugugguggccaa

SEQ ID NO: 3441 - RNA, 22 nt, Homo sapiens
guggcaauacaauacaacuaca

SEQ ID NO: 3442 - RNA, 23 nt, Homo sapiens
acuauauuuguacuguauugcua

SEQ ID NO: 3443 - RNA, 22 nt, Homo sapiens
uagacacuagauaugugacuga

SEQ ID NO: 3444 - RNA, 22 nt, Homo sapiens
aaucacucacaugccuaguguc

SEQ ID NO: 3445 - RNA, 22 nt, Homo sapiens
acagcaauuaccaagugauuga

SEQ ID NO: 3446 - RNA, 25 nt, Homo sapiens
aagcagcgcccacuuccuccccgcu

SEQ ID NO: 3447 - RNA, 22 nt, Homo sapiens
agaaccucggcuggggcgggcu

SEQ ID NO: 3448 - RNA, 23 nt, Homo sapiens
ccagaacccgcccgcgccggggc

SEQ ID NO: 3449 - RNA, 22 nt, Homo sapiens
aucagagagaugccgccuugcu

SEQ ID NO: 3450 - RNA, 21 nt, Homo sapiens
aaggagcaaggcggcaucucu

SEQ ID NO: 3451 - RNA, 23 nt, Homo sapiens
gcuacagagcaccuccucuucaa

SEQ ID NO: 3452 - RNA, 22 nt, Homo sapiens
uuggagagcaagucacuguugu

SEQ ID NO: 3453 - RNA, 18 nt, Homo sapiens
aaccaccugcccucaccc

SEQ ID NO: 3454 - RNA, 18 nt, Homo sapiens
aucaagccagaagacacg

SEQ ID NO: 3455 - RNA, 23 nt, Homo sapiens
cucaugucuucuggccugaugca

SEQ ID NO: 3456 - RNA, 21 nt, Homo sapiens
auacaguacaggucucucauu

SEQ ID NO: 3457 - RNA, 22 nt, Homo sapiens
gaaaugagagaccuguacugga

SEQ ID NO: 3458 - RNA, 22 nt, Homo sapiens
uucucccacugucuggauccca

SEQ ID NO: 3459 - RNA, 22 nt, Homo sapiens
ugggagccugguagugggagaa

SEQ ID NO: 3460 - RNA, 22 nt, Homo sapiens
caacucugaccaccuagguugg

SEQ ID NO: 3461 - RNA, 22 nt, Homo sapiens
aucaaccuaaggggucagaguu

SEQ ID NO: 3462 - RNA, 23 nt, Homo sapiens
auuggcugcaguuaagguggcac

SEQ ID NO: 3463 - RNA, 22 nt, Homo sapiens
ccaccuuaacugcagccaacuu

SEQ ID NO: 3464 - RNA, 22 nt, Homo sapiens
ucuccauguuuccuucccccuu

SEQ ID NO: 3465 - RNA, 22 nt, Homo sapiens
agaagggggaaggaaacaugga

SEQ ID NO: 3466 - RNA, 21 nt, Homo sapiens
aggccacagccacccaugugu

SEQ ID NO: 3467 - RNA, 22 nt, Homo sapiens
acacauggguggcuguggccua

SEQ ID NO: 3468 - RNA, 21 nt, Homo sapiens
ugcuugguuucagguacagcu

SEQ ID NO: 3469 - RNA, 22 nt, Homo sapiens
ccugcauauuauagauuuguga

SEQ ID NO: 3470 - RNA, 21 nt, Homo sapiens
auacuugguacaacuuaagca

SEQ ID NO: 3471 - RNA, 22 nt, Homo sapiens
aaguuauaccaaauaugccagg

SEQ ID NO: 3472 - RNA, 22 nt, Homo sapiens
ccaccgucaccuggagcccuca

SEQ ID NO: 3473 - RNA, 22 nt, Homo sapiens
cugcagggaggugcuggcaggu

SEQ ID NO: 3474 - RNA, 23 nt, Homo sapiens
caaccuggcacagcccuccugcc

SEQ ID NO: 3475 - RNA, 22 nt, Homo sapiens
uuuggggaggagccagagaggg

SEQ ID NO: 3476 - RNA, 24 nt, Homo sapiens
ugcucuuaucucauggcuccccca

SEQ ID NO: 3477 - RNA, 21 nt, Homo sapiens
acuagcugaaccagaagguac

SEQ ID NO: 3478 - RNA, 23 nt, Homo sapiens
cgaagcucacuccugguucaguu

SEQ ID NO: 3479 - RNA, 22 nt, Homo sapiens
cccgacacugacgccuucccca

SEQ ID NO: 3480 - RNA, 21 nt, Homo sapiens
ggugggaaggcugcagggucu

SEQ ID NO: 3481 - RNA, 22 nt, Homo sapiens
ugcggccagagggaaccugggu

SEQ ID NO: 3482 - RNA, 23 nt, Homo sapiens
ccacuccaggcuccucuggcccu

SEQ ID NO: 3483 - RNA, 22 nt, Homo sapiens
gaaucugccagcuucccacuau

SEQ ID NO: 3484 - RNA, 21 nt, Homo sapiens
ccacuguggaagcuggcagau

SEQ ID NO: 3485 - RNA, 25 nt, Homo sapiens
cuggggcaggagggaggucagcaug

SEQ ID NO: 3486 - RNA, 23 nt, Homo sapiens
ugcuugcugccucuccccuccca

SEQ ID NO: 3487 - RNA, 22 nt, Homo sapiens
uagcuucccaacagauaaauga

SEQ ID NO: 3488 - RNA, 23 nt, Homo sapiens
uggcauggaaugggcuccgccag

SEQ ID NO: 3489 - RNA, 22 nt, Homo sapiens
aguguugggggccacuugugug

SEQ ID NO: 3490 - RNA, 22 nt, Homo sapiens
cacacucauguggcccccagca

SEQ ID NO: 3491 - RNA, 21 nt, Homo sapiens
cagaacaggacaggucagggc

SEQ ID NO: 3492 - RNA, 23 nt, Homo sapiens
agcuuccugcucccugcucuaca

SEQ ID NO: 3493 - RNA, 22 nt, Homo sapiens
aucccaaugcuagaccuggugg

SEQ ID NO: 3494 - RNA, 22 nt, Homo sapiens
caccgggucuagcauugggauu

SEQ ID NO: 3495 - RNA, 22 nt, Homo sapiens
cgcccugaccgcagcccgcagc

SEQ ID NO: 3496 - RNA, 21 nt, Homo sapiens
augucuaauuugagcaccuuu

SEQ ID NO: 3497 - RNA, 22 nt, Homo sapiens
uaccgaagguguucaaauuagg

SEQ ID NO: 3498 - RNA, 19 nt, Homo sapiens
cagcccagauaaccugccu

SEQ ID NO: 3499 - RNA, 20 nt, Homo sapiens
cacugucagcauccucgcau

SEQ ID NO: 3500 - RNA, 22 nt, Homo sapiens
uccuccaggcgcuccaguuuca

SEQ ID NO: 3501 - RNA, 22 nt, Homo sapiens
augaaacugaaaacgcgcuggu

SEQ ID NO: 3502 - RNA, 25 nt, Homo sapiens
agggccccuccgcuccuccucccuu

SEQ ID NO: 3503 - RNA, 22 nt, Homo sapiens
gcagggacggauccucucgggc

SEQ ID NO: 3504 - RNA, 22 nt, Homo sapiens
ccugcccgagaggaucaguccu

SEQ ID NO: 3505 - RNA, 23 nt, Homo sapiens
agccgaccccuccggacagcccg

SEQ ID NO: 3506 - RNA, 23 nt, Homo sapiens
cugcaggcaaaggagaauacaga

SEQ ID NO: 3507 - RNA, 23 nt, Homo sapiens
ucuguaaauaucccuuugccuga

SEQ ID NO: 3508 - RNA, 21 nt, Homo sapiens
cuggaccagaaaagacagaaa

SEQ ID NO: 3509 - RNA, 23 nt, Homo sapiens
augccuccugucccauccggcca

SEQ ID NO: 3510 - RNA, 23 nt, Homo sapiens
cauagcgaagucuagucuuuaga

SEQ ID NO: 3511 - RNA, 23 nt, Homo sapiens
gaccgugagacgucgccgggcca

SEQ ID NO: 3512 - RNA, 23 nt, Homo sapiens
cgccgucccgggagccccacuca

SEQ ID NO: 3513 - RNA, 21 nt, Homo sapiens
ucggcccgcaggagcaccgcu

SEQ ID NO: 3514 - RNA, 23 nt, Homo sapiens
ucugcagguucuccugggaccgg

SEQ ID NO: 3515 - RNA, 22 nt, Homo sapiens
cugggaggaaagcccgggccuu

SEQ ID NO: 3516 - RNA, 22 nt, Homo sapiens
cuaagaccaagccuccuucccu

SEQ ID NO: 3517 - RNA, 21 nt, Homo sapiens
agcaaauccuccccaaaccuc

SEQ ID NO: 3518 - RNA, 20 nt, Homo sapiens
cugugggggcaggaggggcg

SEQ ID NO: 3519 - RNA, 22 nt, Homo sapiens
gaugcccuggccuguccccgca

SEQ ID NO: 3520 - RNA, 22 nt, Homo sapiens
cugcgggagggggugggucagg

SEQ ID NO: 3521 - RNA, 22 nt, Homo sapiens
cacucaaccaccuccgcccgag

SEQ ID NO: 3522 - RNA, 24 nt, Homo sapiens
ccuucuagcagcuacggguccucu

SEQ ID NO: 3523 - RNA, 22 nt, Homo sapiens
agcacauccuugagauccacaa

SEQ ID NO: 3524 - RNA, 22 nt, Homo sapiens
acacaaggcuaaagaaagagaa

SEQ ID NO: 3525 - RNA, 22 nt, Homo sapiens
cuguucucuuccuuuggccuug

SEQ ID NO: 3526 - RNA, 23 nt, Homo sapiens
acuccgcuaacccagguccgcau

SEQ ID NO: 3527 - RNA, 22 nt, Homo sapiens
acuuucccuucagagccuggcu

SEQ ID NO: 3528 - RNA, 22 nt, Homo sapiens
aaagccaggcucugaagggaaa

SEQ ID NO: 3529 - RNA, 22 nt, Homo sapiens
auaggaaggcaaccaucucugg

SEQ ID NO: 3530 - RNA, 23 nt, Homo sapiens
agcagagagugagcgccucccug

SEQ ID NO: 3531 - RNA, 22 nt, Homo sapiens
gcgaagccucugugacgucaug

SEQ ID NO: 3532 - RNA, 23 nt, Homo sapiens
acaccgugacgucacagaggccu

SEQ ID NO: 3533 - RNA, 23 nt, Homo sapiens
gaggguggucagcagguggggca

SEQ ID NO: 3534 - RNA, 23 nt, Homo sapiens
cagccccaccggcucccacucac

SEQ ID NO: 3535 - RNA, 21 nt, Homo sapiens
uaauuccaacaucuaguccua

SEQ ID NO: 3536 - RNA, 22 nt, Homo sapiens
gguuuagauugaacaugaauuu

SEQ ID NO: 3537 - RNA, 22 nt, Homo sapiens
cuaacuucauguucaaucuaaa

SEQ ID NO: 3538 - RNA, 21 nt, Homo sapiens
ggacaaagugcgcaugcccuc

SEQ ID NO: 3539 - RNA, 21 nt, Homo sapiens
ggucaggcaugcacaccuugu

SEQ ID NO: 3540 - RNA, 22 nt, Homo sapiens
caccacaaaucuugaucagaag

SEQ ID NO: 3541 - RNA, 21 nt, Homo sapiens
aggcuucugaucaagauuugg

SEQ ID NO: 3542 - RNA, 24 nt, Homo sapiens
cccgcccagcaccagccccugccu

SEQ ID NO: 3543 - RNA, 21 nt, Homo sapiens
agcaggagggcugggcaggcg

SEQ ID NO: 3544 - RNA, 22 nt, Homo sapiens
ccaugggugugaaaggaguuaa

SEQ ID NO: 3545 - RNA, 21 nt, Homo sapiens
agauaacuccuuccacaucca

SEQ ID NO: 3546 - RNA, 22 nt, Homo sapiens
gaacauagcuaucaaucacuca

SEQ ID NO: 3547 - RNA, 21 nt, Homo sapiens
uuccaaaagagcaauugcuau

SEQ ID NO: 3548 - RNA, 21 nt, Homo sapiens
aacaccaacugcucuuucaga

SEQ ID NO: 3549 - RNA, 23 nt, Homo sapiens
ggcggcggccaggagcgcccgcg

SEQ ID NO: 3550 - RNA, 20 nt, Homo sapiens
auucucucuggaucuccugg

SEQ ID NO: 3551 - RNA, 22 nt, Homo sapiens
auccaugggauccagagagaau

SEQ ID NO: 3552 - RNA, 22 nt, Homo sapiens
guaggggagggaggauggcaga

SEQ ID NO: 3553 - RNA, 24 nt, Homo sapiens
cucauaccuucucuccaucccacc

SEQ ID NO: 3554 - RNA, 18 nt, Homo sapiens
agcuacagugucaucuca

SEQ ID NO: 3555 - RNA, 21 nt, Homo sapiens
uaauuguaggucaagucugcu

SEQ ID NO: 3556 - RNA, 22 nt, Homo sapiens
ucugaucaggcaaaguugcagg

SEQ ID NO: 3557 - RNA, 22 nt, Homo sapiens
agucugcaauuuugccugauca

SEQ ID NO: 3558 - RNA, 22 nt, Homo sapiens
gccuuucuaugcuccuguucug

SEQ ID NO: 3559 - RNA, 21 nt, Homo sapiens
uucuggcacauguuaggcaau

SEQ ID NO: 3560 - RNA, 22 nt, Homo sapiens
uuauuaccuacuacauaccaga

SEQ ID NO: 3561 - RNA, 22 nt, Homo sapiens
agugaccgaaacaaaaaauuaa

SEQ ID NO: 3562 - RNA, 23 nt, Homo sapiens
augcaguggaccaggauggcaag

SEQ ID NO: 3563 - RNA, 22 nt, Homo sapiens
agcccuugccauccugguccac

SEQ ID NO: 3564 - RNA, 22 nt, Homo sapiens
uacagcauucuagaugagguau

SEQ ID NO: 3565 - RNA, 22 nt, Homo sapiens
uauauauaucucucaucuagaa

SEQ ID NO: 3566 - RNA, 22 nt, Homo sapiens
ucaacucugcaaaggaagaaga

SEQ ID NO: 3567 - RNA, 22 nt, Homo sapiens
ccucuucuuccuuuacagaauu

SEQ ID NO: 3568 - RNA, 22 nt, Homo sapiens
cugcuuuuacuauucccuccua

SEQ ID NO: 3569 - RNA, 22 nt, Homo sapiens
gcuagggaucaggcucaagggu

SEQ ID NO: 3570 - RNA, 22 nt, Homo sapiens
cucuagcgaggauuccaacauu

SEQ ID NO: 3571 - RNA, 21 nt, Homo sapiens
ccaauauuggaauccccgcua

SEQ ID NO: 3572 - RNA, 22 nt, Homo sapiens
guucuagauaugaagacaauca

SEQ ID NO: 3573 - RNA, 22 nt, Homo sapiens
uugauugucuucauauccagaa

SEQ ID NO: 3574 - RNA, 23 nt, Homo sapiens
gcagacgcgccccaacaccgggg

SEQ ID NO: 3575 - RNA, 21 nt, Homo sapiens
agcccgggagcugggcgcgcc

SEQ ID NO: 3576 - RNA, 20 nt, Homo sapiens
ucagucccagcaucuccuca

SEQ ID NO: 3577 - RNA, 21 nt, Homo sapiens
gcuggcggcgucgccgacucu

SEQ ID NO: 3578 - RNA, 22 nt, Homo sapiens
gcccagaccagagcuggcuuca

SEQ ID NO: 3579 - RNA, 22 nt, Homo sapiens
ggugcauccaguccuggucuca

SEQ ID NO: 3580 - RNA, 24 nt, Homo sapiens
gcgcggggcagugggcggcgcauc

SEQ ID NO: 3581 - RNA, 22 nt, Homo sapiens
gggaugccgccgccacccccgc

SEQ ID NO: 3582 - RNA, 22 nt, Homo sapiens
gccucccuuagcugguccguaa

SEQ ID NO: 3583 - RNA, 21 nt, Homo sapiens
uauauacaccugcuaugugug

SEQ ID NO: 3584 - RNA, 22 nt, Homo sapiens
cauacacauaucagguguauac

SEQ ID NO: 3585 - RNA, 22 nt, Homo sapiens
ugugacaucgcuuuaccauuca

SEQ ID NO: 3586 - RNA, 20 nt, Homo sapiens
aacaugaaugguaaagcgau

SEQ ID NO: 3587 - RNA, 18 nt, Homo sapiens
uuucagucaucauaucca

SEQ ID NO: 3588 - RNA, 18 nt, Homo sapiens
gccagcgagcgcucaccg

SEQ ID NO: 3589 - RNA, 23 nt, Homo sapiens
agccagccaacucacagugcaga

SEQ ID NO: 3590 - RNA, 24 nt, Homo sapiens
ccucugcccuguggagcaggaugu

SEQ ID NO: 3591 - RNA, 22 nt, Homo sapiens
acagucucgugagauagccaga

SEQ ID NO: 3592 - RNA, 22 nt, Homo sapiens
auccagaaguggcuaauaauau

SEQ ID NO: 3593 - RNA, 21 nt, Homo sapiens
ucaauauuauuagccacuucu

SEQ ID NO: 3594 - RNA, 22 nt, Homo sapiens
gugucuauacucugccacuuua

SEQ ID NO: 3595 - RNA, 22 nt, Homo sapiens
guaaagugacagaguauagaca

SEQ ID NO: 3596 - RNA, 21 nt, Homo sapiens
acagagugccacuuacugaga

SEQ ID NO: 3597 - RNA, 21 nt, Homo sapiens
uucaguaaguggcacucuguc

SEQ ID NO: 3598 - RNA, 22 nt, Homo sapiens
acuucgguauacuucgugaguu

SEQ ID NO: 3599 - RNA, 22 nt, Homo sapiens
ccaauucacaaaguauaccgaa

SEQ ID NO: 3600 - RNA, 22 nt, Homo sapiens
uauauaaaugcagcaugccagu

SEQ ID NO: 3601 - RNA, 22 nt, Homo sapiens
gacuggcaugcugcauuuagau

SEQ ID NO: 3602 - RNA, 19 nt, Homo sapiens
guggacagacggacggaug

SEQ ID NO: 3603 - RNA, 21 nt, Homo sapiens
uccuuccuuccucgguccacu

SEQ ID NO: 3604 - RNA, 22 nt, Homo sapiens
ugagccuugguuuucuugugua

SEQ ID NO: 3605 - RNA, 23 nt, Homo sapiens
gcuugaagguuuccauccaugua

SEQ ID NO: 3606 - RNA, 22 nt, Homo sapiens
aacauggucuagaaccuccaua

SEQ ID NO: 3607 - RNA, 21 nt, Homo sapiens
ucaauccacacuauuauguua

SEQ ID NO: 3608 - RNA, 21 nt, Homo sapiens
uuucgagggcaagguuaagca

SEQ ID NO: 3609 - RNA, 21 nt, Homo sapiens
uugcuuaaccuuaccguccaa

SEQ ID NO: 3610 - RNA, 21 nt, Homo sapiens
aagacgggaggagaggaguga

SEQ ID NO: 3611 - RNA, 22 nt, Homo sapiens
cucccuucuuuccucccgucuu

SEQ ID NO: 3612 - RNA, 22 nt, Homo sapiens
aucgggaggggacugagccuga

SEQ ID NO: 3613 - RNA, 22 nt, Homo sapiens
agagaggagagccguguaugac

SEQ ID NO: 3614 - RNA, 22 nt, Homo sapiens
gaauucaucacggccagccucu

SEQ ID NO: 3615 - RNA, 21 nt, Homo sapiens
auccuguacugagcugccccg

SEQ ID NO: 3616 - RNA, 22 nt, Homo sapiens
cucggggcagcucaguacagga

SEQ ID NO: 3617 - RNA, 22 nt, Homo sapiens
aacuggaugucccuguaugauu

SEQ ID NO: 3618 - RNA, 22 nt, Homo sapiens
aaguggaugacccuguacgauu

SEQ ID NO: 3619 - RNA, 21 nt, Homo sapiens
gaccaagaaauagccuuucaa

SEQ ID NO: 3620 - RNA, 21 nt, Homo sapiens
uugagagugccauuaucuggg

SEQ ID NO: 3621 - RNA, 22 nt, Homo sapiens
gcugccguauaugugaugucac

SEQ ID NO: 3622 - RNA, 22 nt, Homo sapiens
cagcauggaguccuccagguug

SEQ ID NO: 3623 - RNA, 20 nt, Homo sapiens
acccaccuggagauccaugg

SEQ ID NO: 3624 - RNA, 22 nt, Homo sapiens
guagaagggaaucuugcauaag

SEQ ID NO: 3625 - RNA, 22 nt, Homo sapiens
ccucauggaaggguuccccacu

SEQ ID NO: 3626 - RNA, 23 nt, Homo sapiens
aagaaucuugucccgcagguccu

SEQ ID NO: 3627 - RNA, 22 nt, Homo sapiens
ccuggcacacaguagaccuuca

SEQ ID NO: 3628 - RNA, 22 nt, Homo sapiens
aaugaaagccuaccauguacaa

SEQ ID NO: 3629 - RNA, 22 nt, Homo sapiens
gagguuucccguguauguuuca

SEQ ID NO: 3630 - RNA, 22 nt, Homo sapiens
aagaagugcaccauguuuguuu

SEQ ID NO: 3631 - RNA, 22 nt, Homo sapiens
cgaaaauaacaugggcaacuuc

SEQ ID NO: 3632 - RNA, 22 nt, Homo sapiens
gagauuggccauguaauacuca

SEQ ID NO: 3633 - RNA, 22 nt, Homo sapiens
ucuaacaccacagugugguuug

SEQ ID NO: 3634 - RNA, 21 nt, Homo sapiens
acaaaccacagugugcugcug

SEQ ID NO: 3635 - RNA, 23 nt, Homo sapiens
gaaaaacgcccccuggcuugaaa

SEQ ID NO: 3636 - RNA, 20 nt, Homo sapiens
acuguauugucagguaguga

SEQ ID NO: 3637 - RNA, 21 nt, Homo sapiens
ucacuaccugacaauacagca

SEQ ID NO: 3638 - RNA, 22 nt, Homo sapiens
agcacagacuugcugugauguu

SEQ ID NO: 3639 - RNA, 21 nt, Homo sapiens
aaacaucacugcaagucuuaa

SEQ ID NO: 3640 - RNA, 22 nt, Homo sapiens
uguuaagacuugcagugauguu

SEQ ID NO: 3641 - RNA, 21 nt, Homo sapiens
ugaacaucacagcaagucugu

SEQ ID NO: 3642 - RNA, 22 nt, Homo sapiens
uccaaguucagaaguguccuga

SEQ ID NO: 3643 - RNA, 22 nt, Homo sapiens
acucaggaacacuucugaacug

SEQ ID NO: 3644 - RNA, 22 nt, Homo sapiens
aaggaccuggacagaggcagaa

SEQ ID NO: 3645 - RNA, 24 nt, Homo sapiens
agcuccgccgcugaguccagcccu

SEQ ID NO: 3646 - RNA, 21 nt, Homo sapiens
aaguggucagugaggcaguca

SEQ ID NO: 3647 - RNA, 24 nt, Homo sapiens
acuaagugccucagaaaccaaauu

SEQ ID NO: 3648 - RNA, 21 nt, Homo sapiens
ccccaacaaccuagaaaagua

SEQ ID NO: 3649 - RNA, 23 nt, Homo sapiens
ucuacccugcaagguuguuguga

SEQ ID NO: 3650 - RNA, 22 nt, Homo sapiens
cugaggcccaggaaaauccaag

SEQ ID NO: 3651 - RNA, 22 nt, Homo sapiens
ucgugaauuugcccuguccuca

SEQ ID NO: 3652 - RNA, 21 nt, Homo sapiens
cugccaggauggaaagggaaa

SEQ ID NO: 3653 - RNA, 21 nt, Homo sapiens
uuccaccuccugcccuggcaa

SEQ ID NO: 3654 - RNA, 22 nt, Homo sapiens
auuagaguuugguucauaugau

SEQ ID NO: 3655 - RNA, 22 nt, Homo sapiens
aaaccauaucagccagacucua

SEQ ID NO: 3656 - RNA, 21 nt, Homo sapiens
gcgaggcccugggagcacagg

SEQ ID NO: 3657 - RNA, 22 nt, Homo sapiens
ccacugugccccaagggccuca

SEQ ID NO: 3658 - RNA, 22 nt, Homo sapiens
uuuuggacuuucagauuuagga

SEQ ID NO: 3659 - RNA, 24 nt, Homo sapiens
auccccaaaucugaaaaaguccaa

SEQ ID NO: 3660 - RNA, 22 nt, Homo sapiens
cagaauccuugcccaggugcau

SEQ ID NO: 3661 - RNA, 23 nt, Homo sapiens
ucucacccagguagcaaggauua

SEQ ID NO: 3662 - RNA, 18 nt, Homo sapiens
acccagguagcaaggauu

SEQ ID NO: 3663 - RNA, 22 nt, Homo sapiens
cuggggaaugggagacacaaaa

SEQ ID NO: 3664 - RNA, 22 nt, Homo sapiens
aauuuugcucugccaucccccu

SEQ ID NO: 3665 - RNA, 22 nt, Homo sapiens
uguuauauauacagccaugcac

SEQ ID NO: 3666 - RNA, 21 nt, Homo sapiens
gagugcauggcuguauauaua

SEQ ID NO: 3667 - RNA, 22 nt, Homo sapiens
agaauccuugcccgggugcauu

SEQ ID NO: 3668 - RNA, 22 nt, Homo sapiens
ucucacccagggacaaaggauu

SEQ ID NO: 3669 - RNA, 22 nt, Homo sapiens
ugaauccuugcccaggugcauu

SEQ ID NO: 3670 - RNA, 21 nt, Homo sapiens
uagcacccagauagcaaggau

SEQ ID NO: 3671 - RNA, 23 nt, Homo sapiens
ccuggcagcggaaacaauacccc

SEQ ID NO: 3672 - RNA, 23 nt, Homo sapiens
cugcagaacuguucccgcugcua

SEQ ID NO: 3673 - RNA, 22 nt, Homo sapiens
gauagagugcagaccagggucu

SEQ ID NO: 3674 - RNA, 21 nt, Homo sapiens
accuuacaaccgcagcugcaa

SEQ ID NO: 3675 - RNA, 22 nt, Homo sapiens
aggaaaccagcaaguguugacg

SEQ ID NO: 3676 - RNA, 22 nt, Homo sapiens
acaucaauacuuccuggcuccc

SEQ ID NO: 3677 - RNA, 21 nt, Homo sapiens
ucuacucagaagggugccuua

SEQ ID NO: 3678 - RNA, 22 nt, Homo sapiens
uuaaguaacaccuuccugaaua

SEQ ID NO: 3679 - RNA, 21 nt, Homo sapiens
uucacuccaaaaggugcaaaa

SEQ ID NO: 3680 - RNA, 23 nt, Homo sapiens
ucuacuccaaaaggcuacaauca

SEQ ID NO: 3681 - RNA, 23 nt, Homo sapiens
caugagugacgcccucuggagua

SEQ ID NO: 3682 - RNA, 23 nt, Homo sapiens
caugccagcaaagcuacaaaccc

SEQ ID NO: 3683 - RNA, 23 nt, Homo sapiens
cuccauccaaucccugagcccug

SEQ ID NO: 3684 - RNA, 23 nt, Homo sapiens
ucagugggauuuccgaguagcau

SEQ ID NO: 3685 - RNA, 21 nt, Homo sapiens
gaugcuacucagaaaucccac

SEQ ID NO: 3686 - RNA, 23 nt, Homo sapiens
cacccuacaccaaucugccccgg

SEQ ID NO: 3687 - RNA, 23 nt, Homo sapiens
cagcacagucuugucgucuccgu

SEQ ID NO: 3688 - RNA, 22 nt, Homo sapiens
gaugccaagcucagcguggauu

SEQ ID NO: 3689 - RNA, 23 nt, Homo sapiens
gcuccuagccagccucauuuccu

SEQ ID NO: 3690 - RNA, 22 nt, Homo sapiens
caugauugccacgucugcagua

SEQ ID NO: 3691 - RNA, 22 nt, Homo sapiens
cuacccacagacguaccaauca

SEQ ID NO: 3692 - RNA, 22 nt, Homo sapiens
agguucaaggcauucacugauu

SEQ ID NO: 3693 - RNA, 21 nt, Homo sapiens
cgcggugguucacgccuguaa

SEQ ID NO: 3694 - RNA, 21 nt, Homo sapiens
ugauugccacugucugcagua

SEQ ID NO: 3695 - RNA, 21 nt, Homo sapiens
gccugaccaacauggugaaac

SEQ ID NO: 3696 - RNA, 22 nt, Homo sapiens
gugauugccacucuccugagua

SEQ ID NO: 3697 - RNA, 22 nt, Homo sapiens
agaggcaccgcugggaucugaa

SEQ ID NO: 3698 - RNA, 21 nt, Homo sapiens
ugacugcagagcaaaagacac

SEQ ID NO: 3699 - RNA, 22 nt, Homo sapiens
gaccucagcuaugacagcacuu

SEQ ID NO: 3700 - RNA, 23 nt, Homo sapiens
gaaagugcccucaaggcugagug

SEQ ID NO: 3701 - RNA, 23 nt, Homo sapiens
ccuucucagaaaggugaaauuua

SEQ ID NO: 3702 - RNA, 18 nt, Homo sapiens
augacaccucccugugaa

SEQ ID NO: 3703 - RNA, 22 nt, Homo sapiens
auaaaugacaccuccuugugaa

SEQ ID NO: 3704 - RNA, 23 nt, Homo sapiens
ucuucucagaaaggugaaauuua

SEQ ID NO: 3705 - RNA, 22 nt, Homo sapiens
auaaacgacaccuccuugagaa

SEQ ID NO: 3706 - RNA, 21 nt, Homo sapiens
ucuacucacagaagugucaau

SEQ ID NO: 3707 - RNA, 23 nt, Homo sapiens
caugauugucacucuccagagua

SEQ ID NO: 3708 - RNA, 21 nt, Homo sapiens
uccacucacagaggugucaau

SEQ ID NO: 3709 - RNA, 22 nt, Homo sapiens
augauugccucccucuugagaa

SEQ ID NO: 3710 - RNA, 22 nt, Homo sapiens
aacgcuccaaaagaaggcacuc

SEQ ID NO: 3711 - RNA, 24 nt, Homo sapiens
cagaaagugcuuucuuuuggagaa

SEQ ID NO: 3712 - RNA, 18 nt, Homo sapiens
acccucugaaaggaagca

SEQ ID NO: 3713 - RNA, 23 nt, Homo sapiens
gaaagugcuucuuuccucgagaa

SEQ ID NO: 3714 - RNA, 18 nt, Homo sapiens
acccucugaaaggaagca

SEQ ID NO: 3715 - RNA, 22 nt, Homo sapiens
aaagugcuucuuaccuccagau

SEQ ID NO: 3716 - RNA, 22 nt, Homo sapiens
agacagugcuuccaucuagagg

SEQ ID NO: 3717 - RNA, 22 nt, Homo sapiens
acacucuaaagggaugcacgau

SEQ ID NO: 3718 - RNA, 22 nt, Homo sapiens
acacucuaaagggaugcacgau

SEQ ID NO: 3719 - RNA, 22 nt, Homo sapiens
acacucuaaaaggaugcacgau

SEQ ID NO: 3720 - RNA, 21 nt, Homo sapiens
accugauuucuaccaaucucu

SEQ ID NO: 3721 - RNA, 21 nt, Homo sapiens
cugaggaaaagaggauucagu

SEQ ID NO: 3722 - RNA, 22 nt, Homo sapiens
uccacuucaaucccucauccca

SEQ ID NO: 3723 - RNA, 23 nt, Homo sapiens
cuccgguuuaaauggguccgauu

SEQ ID NO: 3724 - RNA, 24 nt, Homo sapiens
ccuguccauccgccugugcccaga

SEQ ID NO: 3725 - RNA, 22 nt, Homo sapiens
uccagcaaagggaagcgcuuuc

SEQ ID NO: 3726 - RNA, 20 nt, Homo sapiens
gaaagggcuucccuuugcag

SEQ ID NO: 3727 - RNA, 22 nt, Homo sapiens
accucuaaaggggagcgcuuug

SEQ ID NO: 3728 - RNA, 23 nt, Homo sapiens
acacucuaaagagaagcgcuuug

SEQ ID NO: 3729 - RNA, 23 nt, Homo sapiens
cagaaagugcuucccuccagaga

SEQ ID NO: 3730 - RNA, 21 nt, Homo sapiens
gcuccaaagggaagcgcuuug

SEQ ID NO: 3731 - RNA, 22 nt, Homo sapiens
cagaaagugcuucccucuagag

SEQ ID NO: 3732 - RNA, 21 nt, Homo sapiens
cacucugaagggaagcgcuuu

SEQ ID NO: 3733 - RNA, 22 nt, Homo sapiens
cagaaagcgcuucccucuagag

SEQ ID NO: 3734 - RNA, 21 nt, Homo sapiens
ccucuaaagagaagcgcuuuc

SEQ ID NO: 3735 - RNA, 22 nt, Homo sapiens
gagaaagugcuucccucuagag

SEQ ID NO: 3736 - RNA, 21 nt, Homo sapiens
uggcuccagcucagucacugg

SEQ ID NO: 3737 - RNA, 22 nt, Homo sapiens
agcacuucauucuuccuauccu

SEQ ID NO: 3738 - RNA, 22 nt, Homo sapiens
accaccuggaauccacucuccu

SEQ ID NO: 3739 - RNA, 22 nt, Homo sapiens
acugggaugagguagaggagga

SEQ ID NO: 3740 - RNA, 22 nt, Homo sapiens
ccaucccauuccaaaccccuca

SEQ ID NO: 3741 - RNA, 21 nt, Homo sapiens
agcccccucagagaacuggau

SEQ ID NO: 3742 - RNA, 22 nt, Homo sapiens
ccauccaguugccuuagggguu

SEQ ID NO: 3743 - RNA, 21 nt, Homo sapiens
cugggagggagacgaggauga

SEQ ID NO: 3744 - RNA, 22 nt, Homo sapiens
cccaacccucguccccuucccu

SEQ ID NO: 3745 - RNA, 23 nt, Homo sapiens
auucgaugacucagucucuucuu

SEQ ID NO: 3746 - RNA, 23 nt, Homo sapiens
ucaagaaugaguuugugccauug

SEQ ID NO: 3747 - RNA, 22 nt, Homo sapiens
acacucuaaaaggaugcacuuu

SEQ ID NO: 3748 - RNA, 22 nt, Homo sapiens
cagaaagcgcuucccucuagag

SEQ ID NO: 3749 - RNA, 22 nt, Homo sapiens
aaccucuaaaaggaugcacuuu

SEQ ID NO: 3750 - RNA, 22 nt, Homo sapiens
cagaaagcgcuucccucuagag

SEQ ID NO: 3751 - RNA, 22 nt, Homo sapiens
auccucuaaaaagaugcacuuu

SEQ ID NO: 3752 - RNA, 22 nt, Homo sapiens
cagaaagcgcuucccucuagag

SEQ ID NO: 3753 - RNA, 22 nt, Homo sapiens
cacucuaaagggaggcacuuug

SEQ ID NO: 3754 - RNA, 22 nt, Homo sapiens
aacacucuaaaaggaggcacuu

SEQ ID NO: 3755 - RNA, 22 nt, Homo sapiens
gaaagugcucccuuuuggagaa

SEQ ID NO: 3756 - RNA, 22 nt, Homo sapiens
acaguccaaagggaagcacuuu

SEQ ID NO: 3757 - RNA, 21 nt, Homo sapiens
agaaaguacuucccucuggag

SEQ ID NO: 3758 - RNA, 21 nt, Homo sapiens
cccucuaaaaggaagcacuuu

SEQ ID NO: 3759 - RNA, 22 nt, Homo sapiens
acccucuaaaaggaagcacuuu

SEQ ID NO: 3760 - RNA, 22 nt, Homo sapiens
cagaaagugcuucccucuagag

SEQ ID NO: 3761 - RNA, 22 nt, Homo sapiens
acccaccaaagagaagcacuuu

SEQ ID NO: 3762 - RNA, 20 nt, Homo sapiens
gaaagggcuucccuuuguag

SEQ ID NO: 3763 - RNA, 21 nt, Homo sapiens
cccucaaaaaggaagcacuuu

SEQ ID NO: 3764 - RNA, 22 nt, Homo sapiens
aacccucuaaaaggaagcacuu

SEQ ID NO: 3765 - RNA, 24 nt, Homo sapiens
acacucuaaagggaagcacuuugu

SEQ ID NO: 3766 - RNA, 22 nt, Homo sapiens
acucuaaagggaagcacuuugu

SEQ ID NO: 3767 - RNA, 22 nt, Homo sapiens
acacucuaaagggaagugcguu

SEQ ID NO: 3768 - RNA, 22 nt, Homo sapiens
acacucuaaagggaaccauuuu

SEQ ID NO: 3769 - RNA, 22 nt, Homo sapiens
cagaaagcgcuucccucuagag

SEQ ID NO: 3770 - RNA, 23 nt, Homo sapiens
acccucuauagggaagcgcguuc

SEQ ID NO: 3771 - RNA, 22 nt, Homo sapiens
cagaaagcgcuucccucuagag

SEQ ID NO: 3772 - RNA, 21 nt, Homo sapiens
acuccaaagggaagcgccuuc

SEQ ID NO: 3773 - RNA, 22 nt, Homo sapiens
gagaaagugcuucccuuuguag

SEQ ID NO: 3774 - RNA, 22 nt, Homo sapiens
cgcucuaaagggaagcgccuuc

SEQ ID NO: 3775 - RNA, 21 nt, Homo sapiens
agaaagugcaucccucuggag

SEQ ID NO: 3776 - RNA, 22 nt, Homo sapiens
cagaaagugcuucccucuagag

SEQ ID NO: 3777 - RNA, 22 nt, Homo sapiens
gccucuaaaaggaagcacuuuc

SEQ ID NO: 3778 - RNA, 23 nt, Homo sapiens
acagaaagugcuucccucaagag

SEQ ID NO: 3779 - RNA, 20 nt, Homo sapiens
gaaagggcuucccuuugcag

SEQ ID NO: 3780 - RNA, 22 nt, Homo sapiens
ugcaagccuugggugugggagg

SEQ ID NO: 3781 - RNA, 22 nt, Homo sapiens
acgguccuacacucaaggcaug

SEQ ID NO: 3782 - RNA, 22 nt, Homo sapiens
aaagaaauuguccuuguaugau

SEQ ID NO: 3783 - RNA, 22 nt, Homo sapiens
acacaccaaggauaauuucucc

SEQ ID NO: 3784 - RNA, 22 nt, Homo sapiens
aguccagauucugugcccacca

SEQ ID NO: 3785 - RNA, 25 nt, Homo sapiens
agugggaccgacagcagaauccuuu

SEQ ID NO: 3786 - RNA, 22 nt, Homo sapiens
uuucaguuaucaaucugucaca

SEQ ID NO: 3787 - RNA, 23 nt, Homo sapiens
ucucgugacaugaugauccccga

SEQ ID NO: 3788 - RNA, 22 nt, Homo sapiens
aagaagugcaccgcgaauguuu

SEQ ID NO: 3789 - RNA, 22 nt, Homo sapiens
gaacuugcuaaaaaugcagaau

SEQ ID NO: 3790 - RNA, 22 nt, Homo sapiens
uuagaaaugcacaaccucaggu

SEQ ID NO: 3791 - RNA, 22 nt, Homo sapiens
gcacacaauaaauguuugcuga

SEQ ID NO: 3792 - RNA, 22 nt, Homo sapiens
ucaucuaauaaacauuuacuga

SEQ ID NO: 3793 - RNA, 22 nt, Homo sapiens
uggugcaaaaguaacuguagcu

SEQ ID NO: 3794 - RNA, 20 nt, Homo sapiens
gaaaguaauugcaguuuuua

SEQ ID NO: 3795 - RNA, 23 nt, Homo sapiens
caaaaacugcaauuacuuuugca

SEQ ID NO: 3796 - RNA, 22 nt, Homo sapiens
uggcaaaaccgcaauuacuucu

SEQ ID NO: 3797 - RNA, 22 nt, Homo sapiens
gcaaaaguaauugccaguuuug

SEQ ID NO: 3798 - RNA, 22 nt, Homo sapiens
gguaaaacucgcaauuacuuuu

SEQ ID NO: 3799 - RNA, 25 nt, Homo sapiens
uggugcaaaaguaauugugguuuuu

SEQ ID NO: 3800 - RNA, 22 nt, Homo sapiens
agcaaaauccacaauuacuuuu

SEQ ID NO: 3801 - RNA, 22 nt, Homo sapiens
caaaaguaauugccgguuuuug

SEQ ID NO: 3802 - RNA, 22 nt, Homo sapiens
ugcaaaagucauugucguuuuc

SEQ ID NO: 3803 - RNA, 21 nt, Homo sapiens
ugaaaguaauugcaguuuuug

SEQ ID NO: 3804 - RNA, 21 nt, Homo sapiens
gcagaaaccacaauuaccuuu

SEQ ID NO: 3805 - RNA, 22 nt, Homo sapiens
gcaaaaguaacugcaguuuuug

SEQ ID NO: 3806 - RNA, 20 nt, Homo sapiens
caaacacugcaaucacuuuu

SEQ ID NO: 3807 - RNA, 22 nt, Homo sapiens
gggaaaaacugcaauuaccuuu

SEQ ID NO: 3808 - RNA, 21 nt, Homo sapiens
uaaaaguaauugcaguuuuua

SEQ ID NO: 3809 - RNA, 23 nt, Homo sapiens
caaaaacugcaauuacuuuugca

SEQ ID NO: 3810 - RNA, 21 nt, Homo sapiens
ucaaaaaccgcaguuacuuuu

SEQ ID NO: 3811 - RNA, 22 nt, Homo sapiens
ugguacaaaagucauugccguu

SEQ ID NO: 3812 - RNA, 22 nt, Homo sapiens
acaaaaguaacugcaguuuuug

SEQ ID NO: 3813 - RNA, 22 nt, Homo sapiens
ggcaaaaaccgcaauuacuuuu

SEQ ID NO: 3814 - RNA, 20 nt, Homo sapiens
caaaaaccacaaugccuuuu

SEQ ID NO: 3815 - RNA, 22 nt, Homo sapiens
ugcaaaaguagucacggucuuu

SEQ ID NO: 3816 - RNA, 22 nt, Homo sapiens
ugcaaaaaccguaguuacuucu

SEQ ID NO: 3817 - RNA, 19 nt, Homo sapiens
aaaaguaauugugguuuuu

SEQ ID NO: 3818 - RNA, 19 nt, Homo sapiens
aaagaccgcaauuacuuuu

SEQ ID NO: 3819 - RNA, 22 nt, Homo sapiens
gcaaaaguaauugcaguuuuug

SEQ ID NO: 3820 - RNA, 22 nt, Homo sapiens
ggcaaaaacagcaauuacuuuc

SEQ ID NO: 3821 - RNA, 21 nt, Homo sapiens
gcaaaaauaacugcaguuuua

SEQ ID NO: 3822 - RNA, 21 nt, Homo sapiens
gcaaaaacugcaauuacuuuu

SEQ ID NO: 3823 - RNA, 22 nt, Homo sapiens
acaaacauaauuguggguuuua

SEQ ID NO: 3824 - RNA, 22 nt, Homo sapiens
ggcaaaacccgcaauuacuuuu

SEQ ID NO: 3825 - RNA, 21 nt, Homo sapiens
acaaaaguuacugcgguuuug

SEQ ID NO: 3826 - RNA, 22 nt, Homo sapiens
agccaaaaccgcaauaacuuuu

SEQ ID NO: 3827 - RNA, 21 nt, Homo sapiens
cuggugcaaaaguaacugcca

SEQ ID NO: 3828 - RNA, 21 nt, Homo sapiens
gcaaaaaccgcaauuacuuuu

SEQ ID NO: 3829 - RNA, 20 nt, Homo sapiens
gcaaaaguaacugcaguuuu

SEQ ID NO: 3830 - RNA, 18 nt, Homo sapiens
aaauccgcaaguacuuuu

SEQ ID NO: 3831 - RNA, 20 nt, Homo sapiens
aaccgugaugacuuuugcac

SEQ ID NO: 3832 - RNA, 22 nt, Homo sapiens
ugcaagaguaaucgcgguuuug

SEQ ID NO: 3833 - RNA, 21 nt, Homo sapiens
gcaaaaaccacaauuacuuuu

SEQ ID NO: 3834 - RNA, 21 nt, Homo sapiens
gcaaaagugauugcaguuuuu

SEQ ID NO: 3835 - RNA, 22 nt, Homo sapiens
gcaaaaaccacaaucacuuuug

SEQ ID NO: 3836 - RNA, 22 nt, Homo sapiens
acaaaagcaacugagguucuug

SEQ ID NO: 3837 - RNA, 22 nt, Homo sapiens
ggccaaaaccacaauuacuuuu

SEQ ID NO: 3838 - RNA, 22 nt, Homo sapiens
gcaaaaguaauugagauuuuug

SEQ ID NO: 3839 - RNA, 22 nt, Homo sapiens
ggcaaaaaccgcaauuacuuuu

SEQ ID NO: 3840 - RNA, 22 nt, Homo sapiens
gcaaaagaaacugugguuuuug

SEQ ID NO: 3841 - RNA, 22 nt, Homo sapiens
ggcaaaaaccacaauuacuuuu

SEQ ID NO: 3842 - RNA, 22 nt, Homo sapiens
ugcaaaaguagucucaguuuuu

SEQ ID NO: 3843 - RNA, 19 nt, Homo sapiens
aaaaguaauuacaguuuuu

SEQ ID NO: 3844 - RNA, 22 nt, Homo sapiens
guacaaaaguaauuacaguuuu

SEQ ID NO: 3845 - RNA, 23 nt, Homo sapiens
caaaaacugcaauuacuuuugca

SEQ ID NO: 3846 - RNA, 23 nt, Homo sapiens
ugcaaaaguaauugcgguuuuug

SEQ ID NO: 3847 - RNA, 22 nt, Homo sapiens
gacaaaaaccgcgauuacuuuu

SEQ ID NO: 3848 - RNA, 22 nt, Homo sapiens
ggcaaaauccgcaauuacuuuu

SEQ ID NO: 3849 - RNA, 22 nt, Homo sapiens
accaaagaccgcaauuacuuuu

SEQ ID NO: 3850 - RNA, 22 nt, Homo sapiens
agcaaaauccgcaaguacuuuu

SEQ ID NO: 3851 - RNA, 22 nt, Homo sapiens
gacaaaacccgcaaauacuuuu

SEQ ID NO: 3852 - RNA, 21 nt, Homo sapiens
caaaaaccacaaauaccuuug

SEQ ID NO: 3853 - RNA, 22 nt, Homo sapiens
acaaaauccacaauuacuuuug

SEQ ID NO: 3854 - RNA, 22 nt, Homo sapiens
gcaaaaguaacugcaguuuugg

SEQ ID NO: 3855 - RNA, 22 nt, Homo sapiens
ggcaaaaaccgcaauuacuuuu

SEQ ID NO: 3856 - RNA, 22 nt, Homo sapiens
aaaguaacugcaguuuuugcua

SEQ ID NO: 3857 - RNA, 22 nt, Homo sapiens
ccgccauuacuuuugcaccagc

SEQ ID NO: 3858 - RNA, 23 nt, Homo sapiens
aaaauaacugcaguuuuggccau

SEQ ID NO: 3859 - RNA, 25 nt, Homo sapiens
uggugcaaaaguaauugugguuuuu

SEQ ID NO: 3860 - RNA, 21 nt, Homo sapiens
caaaaaccacgaucacuuuug

SEQ ID NO: 3861 - RNA, 23 nt, Homo sapiens
cgcaaaaguaauugcagucuuug

SEQ ID NO: 3862 - RNA, 23 nt, Homo sapiens
aggcaaaaaccgcaguuacuuuu

SEQ ID NO: 3863 - RNA, 22 nt, Homo sapiens
ggcaaaaacagugauuacuuuu

SEQ ID NO: 3864 - RNA, 23 nt, Homo sapiens
ugcaaaaguaauugcgguuuuug

SEQ ID NO: 3865 - RNA, 21 nt, Homo sapiens
agagcucauccauaguuguca

SEQ ID NO: 3866 - RNA, 20 nt, Homo sapiens
cucuuacucccucaggcacu

SEQ ID NO: 3867 - RNA, 22 nt, Homo sapiens
augugccugagggaguaagaca

SEQ ID NO: 3868 - RNA, 23 nt, Homo sapiens
gggcucuuacucccucaggcacu

SEQ ID NO: 3869 - RNA, 22 nt, Homo sapiens
ugucuuacucccucaggcacau

SEQ ID NO: 3870 - RNA, 20 nt, Homo sapiens
cagugccugagggaguaaga

SEQ ID NO: 3871 - RNA, 21 nt, Homo sapiens
uggaaaccaagagugggucgc

SEQ ID NO: 3872 - RNA, 21 nt, Homo sapiens
cugaaaccaaguaugggucgc

SEQ ID NO: 3873 - RNA, 22 nt, Homo sapiens
ggucucacccacgcuugauuuc

SEQ ID NO: 3874 - RNA, 21 nt, Homo sapiens
uugucuaaccagucaccuguu

SEQ ID NO: 3875 - RNA, 21 nt, Homo sapiens
aaaacaaaaucucaccguuuu

SEQ ID NO: 3876 - RNA, 21 nt, Homo sapiens
acuggcugagucaggacuagc

SEQ ID NO: 3877 - RNA, 21 nt, Homo sapiens
aucagagguucagcuuacccu

SEQ ID NO: 3878 - RNA, 22 nt, Homo sapiens
aaagaugagcuaaugguaauau

SEQ ID NO: 3879 - RNA, 22 nt, Homo sapiens
cucauauuacaaugagcucauc

SEQ ID NO: 3880 - RNA, 23 nt, Homo sapiens
agacaaggcccacccgugcaaac

SEQ ID NO: 3881 - RNA, 19 nt, Homo sapiens
cagaggagccuccuaggac

SEQ ID NO: 3882 - RNA, 21 nt, Homo sapiens
gggaggcuccuuugagaauug

SEQ ID NO: 3883 - RNA, 21 nt, Homo sapiens
agcagaccccugcaccccaac

SEQ ID NO: 3884 - RNA, 22 nt, Homo sapiens
gaucugguacuccuuaagcuaa

SEQ ID NO: 3885 - RNA, 21 nt, Homo sapiens
guuagcuuaaggaguaccaua

SEQ ID NO: 3886 - RNA, 19 nt, Homo sapiens
auuuugguacagcagcuca

SEQ ID NO: 3887 - RNA, 22 nt, Homo sapiens
gugcuggcucacuucauaugug

SEQ ID NO: 3888 - RNA, 22 nt, Homo sapiens
acacauaugaaaugagccagca

SEQ ID NO: 3889 - RNA, 22 nt, Homo sapiens
ggaacuucuaggaggcauggaa

SEQ ID NO: 3890 - RNA, 22 nt, Homo sapiens
ucuccauuucuccuggaaggcu

SEQ ID NO: 3891 - RNA, 22 nt, Homo sapiens
ccuaggcacacuuaaaguuuua

SEQ ID NO: 3892 - RNA, 22 nt, Homo sapiens
gcuauaacuuuaagugugccua

SEQ ID NO: 3893 - RNA, 22 nt, Homo sapiens
ccaaacuaauauacccauauuc

SEQ ID NO: 3894 - RNA, 22 nt, Homo sapiens
cagaauauggguauauuaguuu

SEQ ID NO: 3895 - RNA, 22 nt, Homo sapiens
aauugggcaaagggaagaacua

SEQ ID NO: 3896 - RNA, 22 nt, Homo sapiens
ucuaguucuucccauuucccug

SEQ ID NO: 3897 - RNA, 22 nt, Homo sapiens
accuguagucccagcuauucag

SEQ ID NO: 3898 - RNA, 22 nt, Homo sapiens
cucucgaguagcugguacuuca

SEQ ID NO: 3899 - RNA, 22 nt, Homo sapiens
cuuuaaccagcuugucacucug

SEQ ID NO: 3900 - RNA, 22 nt, Homo sapiens
gcauauaguaacaagcuggaua

SEQ ID NO: 3901 - RNA, 21 nt, Homo sapiens
gaugaucacacugcccggggc

SEQ ID NO: 3902 - RNA, 18 nt, Homo sapiens
agucccggaggugaccau

SEQ ID NO: 3903 - RNA, 19 nt, Homo sapiens
gcuggcauuagugggacuu

SEQ ID NO: 3904 - RNA, 21 nt, Homo sapiens
aaaagucccacuaaugccagu

SEQ ID NO: 3905 - RNA, 23 nt, Homo sapiens
ugggagcuagguugccaugugca

SEQ ID NO: 3906 - RNA, 21 nt, Homo sapiens
acugcacaagagcacccagcc

SEQ ID NO: 3907 - RNA, 21 nt, Homo sapiens
uuuuggugcauauuuacuuua

SEQ ID NO: 3908 - RNA, 21 nt, Homo sapiens
uugccauacaugaacuuuauu

SEQ ID NO: 3909 - RNA, 21 nt, Homo sapiens
aauaaagucuauguauggcaa

SEQ ID NO: 3910 - RNA, 21 nt, Homo sapiens
ugggagcuaagcuauggguau

SEQ ID NO: 3911 - RNA, 21 nt, Homo sapiens
auacccauagcuuagcuccca

SEQ ID NO: 3912 - RNA, 22 nt, Homo sapiens
acuucaaggaucuuaaacuuug

SEQ ID NO: 3913 - RNA, 22 nt, Homo sapiens
ggcaaaguuuaagauccuugau

SEQ ID NO: 3914 - RNA, 20 nt, Homo sapiens
gcaaaugguacagcuacuuu

SEQ ID NO: 3915 - RNA, 19 nt, Homo sapiens
gggaaacguaugucaaccu

SEQ ID NO: 3916 - RNA, 19 nt, Homo sapiens
gccugcugacaccgugccu

SEQ ID NO: 3917 - RNA, 19 nt, Homo sapiens
guugggaucacaggcgccc

SEQ ID NO: 3918 - RNA, 23 nt, Homo sapiens
guucuguccuggaagaacauacu

SEQ ID NO: 3919 - RNA, 20 nt, Homo sapiens
guguguauacauuuauacau

SEQ ID NO: 3920 - RNA, 22 nt, Homo sapiens
gcagauuaguccagcauuucuc

SEQ ID NO: 3921 - RNA, 22 nt, Homo sapiens
aagagguauugccacccuuucu

SEQ ID NO: 3922 - RNA, 22 nt, Homo sapiens
acuagaaaggguggcaauaccu

SEQ ID NO: 3923 - RNA, 22 nt, Homo sapiens
accuuauccugcaaggugcuac

SEQ ID NO: 3924 - RNA, 24 nt, Homo sapiens
gaagucagagaaucugcaucugua

SEQ ID NO: 3925 - RNA, 20 nt, Homo sapiens
cuguugcucaggcuagaguu

SEQ ID NO: 3926 - RNA, 22 nt, Homo sapiens
cccgugauaacugcugggcugu

SEQ ID NO: 3927 - RNA, 21 nt, Homo sapiens
acaauacaauacgauacgaua

SEQ ID NO: 3928 - RNA, 22 nt, Homo sapiens
auuugacccuaaaacguucuaa

SEQ ID NO: 3929 - RNA, 22 nt, Homo sapiens
gcuguuuuacagguguuuguua

SEQ ID NO: 3930 - RNA, 22 nt, Homo sapiens
ucuaggacuacagguguaugcu

SEQ ID NO: 3931 - RNA, 21 nt, Homo sapiens
acuuuccaggauucauuaacu

SEQ ID NO: 3932 - RNA, 21 nt, Homo sapiens
ccuaauagagguaguagcuga

SEQ ID NO: 3933 - RNA, 22 nt, Homo sapiens
gcuuucucggagcucagagcaa

SEQ ID NO: 3934 - RNA, 22 nt, Homo sapiens
acacccacugugguauuauuug

SEQ ID NO: 3935 - RNA, 20 nt, Homo sapiens
acaccuacugugauauuauu

SEQ ID NO: 3936 - RNA, 22 nt, Homo sapiens
guacaccuacugugauauuauu

SEQ ID NO: 3937 - RNA, 22 nt, Homo sapiens
gaguucauuucagagccacugc

SEQ ID NO: 3938 - RNA, 21 nt, Homo sapiens
cugagacagucccaugaucug

SEQ ID NO: 3939 - RNA, 22 nt, Homo sapiens
cugucuagauucuucuuggagu

SEQ ID NO: 3940 - RNA, 22 nt, Homo sapiens
ggcaucagacuacuuaaaugag

SEQ ID NO: 3941 - RNA, 22 nt, Homo sapiens
ccuuuaucaugaaacuacuuga

SEQ ID NO: 3942 - RNA, 22 nt, Homo sapiens
ccacaaucacugcacuccccca

SEQ ID NO: 3943 - RNA, 22 nt, Homo sapiens
gcuccaacaaggaaagacagga

SEQ ID NO: 3944 - RNA, 22 nt, Homo sapiens
ccuucaauaauuuaaugcauua

SEQ ID NO: 3945 - RNA, 19 nt, Homo sapiens
aaucagaacgugacaauaa

SEQ ID NO: 3946 - RNA, 22 nt, Homo sapiens
caugggauauguugcugacuca

SEQ ID NO: 3947 - RNA, 18 nt, Homo sapiens
accuucccgacuucuccu

SEQ ID NO: 3948 - RNA, 22 nt, Homo sapiens
gcaaagguaauugcuguuuucg

SEQ ID NO: 3949 - RNA, 22 nt, Homo sapiens
gcauaaugggaugauggccuaa

SEQ ID NO: 3950 - RNA, 23 nt, Homo sapiens
cacaggccaugagccccgaaaca

SEQ ID NO: 3951 - RNA, 22 nt, Homo sapiens
gggaaaaacugcaauuaccuuu

SEQ ID NO: 3952 - RNA, 22 nt, Homo sapiens
agcuucagcauguuauccagaa

SEQ ID NO: 3953 - RNA, 22 nt, Homo sapiens
gccuuguacagcauucaaacgu

SEQ ID NO: 3954 - RNA, 20 nt, Homo sapiens
ggucaggcacagucgcucau

SEQ ID NO: 3955 - RNA, 21 nt, Homo sapiens
cucacucagauggccaacuca

SEQ ID NO: 3956 - RNA, 20 nt, Homo sapiens
ugggccaccgccgagcggac

SEQ ID NO: 3957 - RNA, 24 nt, Homo sapiens
cugaucaguuacacaucacuucag

SEQ ID NO: 3958 - RNA, 20 nt, Homo sapiens
gcuccccauucucucuccgc

SEQ ID NO: 3959 - RNA, 22 nt, Homo sapiens
ugugggugugugcaugagcgug

SEQ ID NO: 3960 - RNA, 23 nt, Homo sapiens
acacacucacacacacacacuca

SEQ ID NO: 3961 - RNA, 19 nt, Homo sapiens
gcuccuguccaacuggcuc

SEQ ID NO: 3962 - RNA, 22 nt, Homo sapiens
gauuccaauuuuuccacaucuu

SEQ ID NO: 3963 - RNA, 22 nt, Homo sapiens
aaagacguggagaaauuagaau

SEQ ID NO: 3964 - RNA, 21 nt, Homo sapiens
cagguaccaauauuuuaucua

SEQ ID NO: 3965 - RNA, 21 nt, Homo sapiens
acaauccuagagcacaagaag

SEQ ID NO: 3966 - RNA, 20 nt, Homo sapiens
accuccccgcgccccagccc

SEQ ID NO: 3967 - RNA, 23 nt, Homo sapiens
aaucgcgguuuauaccaaaugaa

SEQ ID NO: 3968 - RNA, 22 nt, Homo sapiens
ccuaaugauucaucauucucaa

SEQ ID NO: 3969 - RNA, 21 nt, Homo sapiens
acugaucuagagaacacaaga

SEQ ID NO: 3970 - RNA, 22 nt, Homo sapiens
gguucaguuguucaaccaguua

SEQ ID NO: 3971 - RNA, 23 nt, Homo sapiens
aguaacugguugaacaacuguaa

SEQ ID NO: 3972 - RNA, 21 nt, Homo sapiens
guaaugggaccuuccucuuug

SEQ ID NO: 3973 - RNA, 22 nt, Homo sapiens
agccugguuggccuggaacuga

SEQ ID NO: 3974 - RNA, 22 nt, Homo sapiens
cucagucccaggcaaaccauaa

SEQ ID NO: 3975 - RNA, 19 nt, Homo sapiens
uagcauacagauacgccca

SEQ ID NO: 3976 - RNA, 22 nt, Homo sapiens
ggaccuaaaaauacaaugcaua

SEQ ID NO: 3977 - RNA, 21 nt, Homo sapiens
gugacucaucaccuauggaaa

SEQ ID NO: 3978 - RNA, 21 nt, Homo sapiens
guucuaacccauuguggccaa

SEQ ID NO: 3979 - RNA, 24 nt, Homo sapiens
ucugggaaccggcauuuguucuga

SEQ ID NO: 3980 - RNA, 22 nt, Homo sapiens
cucagagcagacgugguucuca

SEQ ID NO: 3981 - RNA, 21 nt, Homo sapiens
acuagcuuauacauaaaauua

SEQ ID NO: 3982 - RNA, 22 nt, Homo sapiens
cugcacuuuuaugaauaagcuc

SEQ ID NO: 3983 - RNA, 20 nt, Homo sapiens
acaaugagaacccauggucu

SEQ ID NO: 3984 - RNA, 22 nt, Homo sapiens
acaucaucgcauauugacacaa

SEQ ID NO: 3985 - RNA, 19 nt, Homo sapiens
agaaaccccagcagagaca

SEQ ID NO: 3986 - RNA, 25 nt, Homo sapiens
gcugagcaaugccuggcuggugccu

SEQ ID NO: 3987 - RNA, 21 nt, Homo sapiens
agacacaccacggcacacuuc

SEQ ID NO: 3988 - RNA, 21 nt, Homo sapiens
cccgaggagccgggcaggcuu

SEQ ID NO: 3989 - RNA, 22 nt, Homo sapiens
acaguggucaucgagugacaca

SEQ ID NO: 3990 - RNA, 22 nt, Homo sapiens
ugacgaugacaacgaugacgua

SEQ ID NO: 3991 - RNA, 20 nt, Homo sapiens
guuugauaaacugacacaac

SEQ ID NO: 3992 - RNA, 23 nt, Homo sapiens
gagcaaggcucuugucuguaagu

SEQ ID NO: 3993 - RNA, 22 nt, Homo sapiens
cuccuccaacaauccuagacca

SEQ ID NO: 3994 - RNA, 23 nt, Homo sapiens
gggccgcagcugucgcccguguc

SEQ ID NO: 3995 - RNA, 22 nt, Homo sapiens
gcaaaaguaauugcagugugug

SEQ ID NO: 3996 - RNA, 19 nt, Homo sapiens
guccugaauuccgcagccu

SEQ ID NO: 3997 - RNA, 23 nt, Homo sapiens
aggagaaggcaccaugggauuua

SEQ ID NO: 3998 - RNA, 21 nt, Homo sapiens
aucuuugauuuucaguaguuu

SEQ ID NO: 3999 - RNA, 21 nt, Homo sapiens
ccaccgccggagacucgcagg

SEQ ID NO: 4000 - RNA, 21 nt, Homo sapiens
gggggcagcaggcccuagccc

SEQ ID NO: 4001 - RNA, 21 nt, Homo sapiens
guuauagaucuggauuugaac

SEQ ID NO: 4002 - RNA, 19 nt, Homo sapiens
cuccagggacuggaaccgg

SEQ ID NO: 4003 - RNA, 19 nt, Homo sapiens
gccuuggccggcagcagaa

SEQ ID NO: 4004 - RNA, 22 nt, Homo sapiens
cuaaggugcagugugaugagga

SEQ ID NO: 4005 - RNA, 20 nt, Homo sapiens
guagcugauaacucacuacc

SEQ ID NO: 4006 - RNA, 20 nt, Homo sapiens
ccaccuagccucugaauauc

SEQ ID NO: 4007 - RNA, 21 nt, Homo sapiens
caccaaugccgccugggccgu

SEQ ID NO: 4008 - RNA, 21 nt, Homo sapiens
ccaccucuccucugucaugcu

SEQ ID NO: 4009 - RNA, 21 nt, Homo sapiens
gaaggccguacagcucuuccc

SEQ ID NO: 4010 - RNA, 19 nt, Homo sapiens
ccacagcuagcucaggcgg

SEQ ID NO: 4011 - RNA, 24 nt, Homo sapiens
cagcuaguugguccaagcuuccaa

SEQ ID NO: 4012 - RNA, 25 nt, Homo sapiens
acggagcugucccaacaccaccccu

SEQ ID NO: 4013 - RNA, 19 nt, Homo sapiens
cgggaacgcccgcacuaga

SEQ ID NO: 4014 - RNA, 24 nt, Homo sapiens
ggcgccuuggccggcacugcuccu

SEQ ID NO: 4015 - RNA, 19 nt, Homo sapiens
ggaucaaccagacguauuc

SEQ ID NO: 4016 - RNA, 20 nt, Homo sapiens
cccacagccucugauauaag

SEQ ID NO: 4017 - RNA, 20 nt, Homo sapiens
ccggccaccgacuggcggaa

SEQ ID NO: 4018 - RNA, 19 nt, Homo sapiens
ugugcucccccagccccuu

SEQ ID NO: 4019 - RNA, 20 nt, Homo sapiens
cucugcccuucccaaccucc

SEQ ID NO: 4020 - RNA, 18 nt, Homo sapiens
gcucgcccccccgccuca

SEQ ID NO: 4021 - RNA, 20 nt, Homo sapiens
cgcccccccgcuucaucucu

SEQ ID NO: 4022 - RNA, 24 nt, Homo sapiens
ccgccccgccccaccccggccucc

SEQ ID NO: 4023 - RNA, 20 nt, Homo sapiens
agagaugagagaaacacccu

SEQ ID NO: 4024 - RNA, 19 nt, Homo sapiens
gccccgccccucgcucccc

SEQ ID NO: 4025 - RNA, 21 nt, Homo sapiens
ucccagcacacauuuagcuca

SEQ ID NO: 4026 - RNA, 23 nt, Homo sapiens
gucagaccccgagggguccucgc

SEQ ID NO: 4027 - RNA, 25 nt, Homo sapiens
aaggagcucagaagcccugcccagc

SEQ ID NO: 4028 - RNA, 20 nt, Homo sapiens
uccucccccuuccuuuuccc

SEQ ID NO: 4029 - RNA, 20 nt, Homo sapiens
uccgccgcuccgccuuccgc

SEQ ID NO: 4030 - RNA, 18 nt, Homo sapiens
ucuccgccgggccuucac

SEQ ID NO: 4031 - RNA, 19 nt, Homo sapiens
ccucccacccacucccuca

SEQ ID NO: 4032 - RNA, 19 nt, Homo sapiens
uuuugacuccaauuccagu

SEQ ID NO: 4033 - RNA, 19 nt, Homo sapiens
uauacacccaacucccuca

SEQ ID NO: 4034 - RNA, 20 nt, Homo sapiens
ggcaaagaaggaacauuccu

SEQ ID NO: 4035 - RNA, 19 nt, Homo sapiens
cauacaauccacucccuca

SEQ ID NO: 4036 - RNA, 19 nt, Homo sapiens
cacucccaucugaccagcc

SEQ ID NO: 4037 - RNA, 19 nt, Homo sapiens
ugcaauccccagcccugcu

SEQ ID NO: 4038 - RNA, 19 nt, Homo sapiens
uacccaaccuccucccuca

SEQ ID NO: 4039 - RNA, 19 nt, Homo sapiens
ucuacauccuaccaccuca

SEQ ID NO: 4040 - RNA, 23 nt, Homo sapiens
ccaccuggcaagaacaggcguuc

SEQ ID NO: 4041 - RNA, 22 nt, Homo sapiens
aagagggagacccaggcucgga

SEQ ID NO: 4042 - RNA, 22 nt, Homo sapiens
gauccgagcaccggggaccccc

SEQ ID NO: 4043 - RNA, 22 nt, Homo sapiens
cugcucaaacccuccaaugacu

SEQ ID NO: 4044 - RNA, 19 nt, Homo sapiens
cuccccucaccuccugcug

SEQ ID NO: 4045 - RNA, 22 nt, Homo sapiens
aagucacugaaggguuuugagu

SEQ ID NO: 4046 - RNA, 22 nt, Homo sapiens
gccaccuucaaaugggaagucu

SEQ ID NO: 4047 - RNA, 23 nt, Homo sapiens
acucagaaggacaaguagaguuu

SEQ ID NO: 4048 - RNA, 24 nt, Homo sapiens
acugggcacaaacauguccagguc

SEQ ID NO: 4049 - RNA, 20 nt, Homo sapiens
auuucuauaucuaucuccau

SEQ ID NO: 4050 - RNA, 21 nt, Homo sapiens
agguaagcgcuguugcuagcc

SEQ ID NO: 4051 - RNA, 21 nt, Homo sapiens
gcuccaaccucagcagacugu

SEQ ID NO: 4052 - RNA, 23 nt, Homo sapiens
acccaacagccccugcaagggau

SEQ ID NO: 4053 - RNA, 21 nt, Homo sapiens
agguaauaccaauaccuugug

SEQ ID NO: 4054 - RNA, 22 nt, Homo sapiens
ugaacacaagguacugguacua

SEQ ID NO: 4055 - RNA, 22 nt, Homo sapiens
ugagggggaaaguucuauaguc

SEQ ID NO: 4056 - RNA, 21 nt, Homo sapiens
ggacuauagaacuuucccccu

SEQ ID NO: 4057 - RNA, 19 nt, Homo sapiens
aagacauuuucagacagcu

SEQ ID NO: 4058 - RNA, 22 nt, Homo sapiens
uccucuuuucuuagagacucac

SEQ ID NO: 4059 - RNA, 21 nt, Homo sapiens
ucgacugccacucuuacuaga

SEQ ID NO: 4060 - RNA, 22 nt, Homo sapiens
ccucuaguaaauaugucagcau

SEQ ID NO: 4061 - RNA, 22 nt, Homo sapiens
gcugggcuuacguugggagaac

SEQ ID NO: 4062 - RNA, 21 nt, Homo sapiens
aguucucccaacguaaaccca

SEQ ID NO: 4063 - RNA, 22 nt, Homo sapiens
accuucccugguacagaauacu

SEQ ID NO: 4064 - RNA, 21 nt, Homo sapiens
gcugaggucugggccaggucu

SEQ ID NO: 4065 - RNA, 19 nt, Homo sapiens
ucccacaggaagcagacac

SEQ ID NO: 4066 - RNA, 23 nt, Homo sapiens
uuuauugugguagauacuauuag

SEQ ID NO: 4067 - RNA, 22 nt, Homo sapiens
guccaaaguuggggugcugguu

SEQ ID NO: 4068 - RNA, 23 nt, Homo sapiens
ggacauuguuucagugcccaagu

SEQ ID NO: 4069 - RNA, 23 nt, Homo sapiens
ugcgggcgggacgagcaagcaca

SEQ ID NO: 4070 - RNA, 24 nt, Homo sapiens
acgcagagcccgaaagcccccagu

SEQ ID NO: 4071 - RNA, 25 nt, Homo sapiens
aggccgccacccgcccgcgaucccu

SEQ ID NO: 4072 - RNA, 23 nt, Homo sapiens
acagcgcucgcaaccgcagcgau

SEQ ID NO: 4073 - RNA, 21 nt, Homo sapiens
agaggcagguuccuggaucau

SEQ ID NO: 4074 - RNA, 24 nt, Homo sapiens
gaggugacucuauccuaugucuuu

SEQ ID NO: 4075 - RNA, 22 nt, Homo sapiens
gguucccucuccaaaugugucu

SEQ ID NO: 4076 - RNA, 22 nt, Homo sapiens
caagacacauuuggagagggac

SEQ ID NO: 4077 - RNA, 22 nt, Homo sapiens
gggucccucuccaaaugugucu

SEQ ID NO: 4078 - RNA, 22 nt, Homo sapiens
agacacauuuggagagggaacc

SEQ ID NO: 4079 - RNA, 22 nt, Homo sapiens
cuaccugagcuagcauacaagu

SEQ ID NO: 4080 - RNA, 19 nt, Homo sapiens
gcucuaagaaagccacacu

SEQ ID NO: 4081 - RNA, 19 nt, Homo sapiens
ucagcaguaccagccuaga

SEQ ID NO: 4082 - RNA, 19 nt, Homo sapiens
gccucagaggcagcugcuu

SEQ ID NO: 4083 - RNA, 21 nt, Homo sapiens
gaaggaagugagugcagccac

SEQ ID NO: 4084 - RNA, 19 nt, Homo sapiens
accagugcccugcacacuu

SEQ ID NO: 4085 - RNA, 22 nt, Homo sapiens
gacucuugaacaacacagguuu

SEQ ID NO: 4086 - RNA, 22 nt, Homo sapiens
ugugggcaaaacaaacacugcu

SEQ ID NO: 4087 - RNA, 22 nt, Homo sapiens
acugcagugcucuugcgcccga

SEQ ID NO: 4088 - RNA, 21 nt, Homo sapiens
guccugagagcgcugccuccu

SEQ ID NO: 4089 - RNA, 21 nt, Homo sapiens
gcaggucaucccaacaagugu

SEQ ID NO: 4090 - RNA, 24 nt, Homo sapiens
ggacaccuggaguggauagcuccu

SEQ ID NO: 4091 - RNA, 23 nt, Homo sapiens
acuguuaccgcaggcugcucugg

SEQ ID NO: 4092 - RNA, 22 nt, Homo sapiens
accaaaggcagcccuggcaacu

SEQ ID NO: 4093 - RNA, 21 nt, Homo sapiens
auacucuagaaagauggucua

SEQ ID NO: 4094 - RNA, 22 nt, Homo sapiens
ggucaacaaucuuucuagagcu

SEQ ID NO: 4095 - RNA, 21 nt, Homo sapiens
ggaggucugcauccuaguccc

SEQ ID NO: 4096 - RNA, 23 nt, Homo sapiens
ucuggggauuugaaugcagaccu

SEQ ID NO: 4097 - RNA, 20 nt, Homo sapiens
agaauggcugugcuguaaug

SEQ ID NO: 4098 - RNA, 21 nt, Homo sapiens
cugcauuacagcacagccaga

SEQ ID NO: 4099 - RNA, 21 nt, Homo sapiens
cuuuggaagagguagaaguca

SEQ ID NO: 4100 - RNA, 22 nt, Homo sapiens
gcugagauauccccuauuccaa

SEQ ID NO: 4101 - RNA, 22 nt, Homo sapiens
gugucuggaaucucugauacga

SEQ ID NO: 4102 - RNA, 23 nt, Homo sapiens
accauauucagugacaucccagu

SEQ ID NO: 4103 - RNA, 22 nt, Homo sapiens
gggaaaaauaggaaggacuuug

SEQ ID NO: 4104 - RNA, 21 nt, Homo sapiens
acaaagucccuccuauucuuc

SEQ ID NO: 4105 - RNA, 22 nt, Homo sapiens
aguucuagaaaugcauggccca

SEQ ID NO: 4106 - RNA, 21 nt, Homo sapiens
ggugggucaugcauuucuaga

SEQ ID NO: 4107 - RNA, 22 nt, Homo sapiens
aaauuagguaguggcaguggaa

SEQ ID NO: 4108 - RNA, 21 nt, Homo sapiens
guuccacugccacuaccuaau

SEQ ID NO: 4109 - RNA, 22 nt, Homo sapiens
caaaagucaagcuuauccuaaa

SEQ ID NO: 4110 - RNA, 21 nt, Homo sapiens
cugcaggagacagagucggug

SEQ ID NO: 4111 - RNA, 22 nt, Homo sapiens
gacuccucucucuccccugcug

SEQ ID NO: 4112 - RNA, 22 nt, Homo sapiens
gcaggcagaagggauggugagg

SEQ ID NO: 4113 - RNA, 23 nt, Homo sapiens
ccugucagccccacuucugccug

SEQ ID NO: 4114 - RNA, 23 nt, Homo sapiens
ugcaggcagaagggguggugagg

SEQ ID NO: 4115 - RNA, 24 nt, Homo sapiens
ugucagccccacuucugccugcag

SEQ ID NO: 4116 - RNA, 22 nt, Homo sapiens
ccuaccauuagaagggcuggaa

SEQ ID NO: 4117 - RNA, 22 nt, Homo sapiens
ucuuccagcucuucuaauggua

SEQ ID NO: 4118 - RNA, 21 nt, Homo sapiens
cuagggacagaugacacuuga

SEQ ID NO: 4119 - RNA, 23 nt, Homo sapiens
agacauguggcgucaaucccaaa

SEQ ID NO: 4120 - RNA, 21 nt, Homo sapiens
cuggaguggaagaacaggcag

SEQ ID NO: 4121 - RNA, 23 nt, Homo sapiens
gccagcugaaaguccacuccaua

SEQ ID NO: 4122 - RNA, 20 nt, Homo sapiens
cugggggguagaugaagaga

SEQ ID NO: 4123 - RNA, 21 nt, Homo sapiens
gaugucuuccacacccuccaa

SEQ ID NO: 4124 - RNA, 21 nt, Homo sapiens
cacaacccuaguggcgccauu

SEQ ID NO: 4125 - RNA, 25 nt, Homo sapiens
ugaauggcacccucuccuaggguug

SEQ ID NO: 4126 - RNA, 21 nt, Homo sapiens
caguagagauuguuucaacac

SEQ ID NO: 4127 - RNA, 22 nt, Homo sapiens
aaggugauggucagcagacaua

SEQ ID NO: 4128 - RNA, 22 nt, Homo sapiens
gcacauguucugcggcccacca

SEQ ID NO: 4129 - RNA, 22 nt, Homo sapiens
aaagagguuaaccauguauuau

SEQ ID NO: 4130 - RNA, 21 nt, Homo sapiens
agagguugacuguauaauauu

SEQ ID NO: 4131 - RNA, 23 nt, Homo sapiens
ccuagagagggugagaaccugcc

SEQ ID NO: 4132 - RNA, 25 nt, Homo sapiens
accaacggaccuacuucccuccgcc

SEQ ID NO: 4133 - RNA, 22 nt, Homo sapiens
uggggacccucccugaaccaag

SEQ ID NO: 4134 - RNA, 22 nt, Homo sapiens
uccuugguucagggaagguccu

SEQ ID NO: 4135 - RNA, 21 nt, Homo sapiens
uaauccaugcacacaggaggu

SEQ ID NO: 4136 - RNA, 22 nt, Homo sapiens
caacuccgauaugcaaugggua

SEQ ID NO: 4137 - RNA, 24 nt, Homo sapiens
acgcgcaggccagagacccaggca

SEQ ID NO: 4138 - RNA, 21 nt, Homo sapiens
cugcugggccacaacguggga

SEQ ID NO: 4139 - RNA, 22 nt, Homo sapiens
gcggucccgcggcgccccgccu

SEQ ID NO: 4140 - RNA, 22 nt, Homo sapiens
ccucaggcacggccgggccacc

SEQ ID NO: 4141 - RNA, 23 nt, Homo sapiens
uguaggcuggggauaaaugaaua

SEQ ID NO: 4142 - RNA, 24 nt, Homo sapiens
auccaaucauuuucccuagccagu

SEQ ID NO: 4143 - RNA, 22 nt, Homo sapiens
uguaggcugggaggcaaaugaa

SEQ ID NO: 4144 - RNA, 24 nt, Homo sapiens
uacccaaucaucucccuuagccca

SEQ ID NO: 4145 - RNA, 20 nt, Homo sapiens
aggggccucagccuccuggu

SEQ ID NO: 4146 - RNA, 23 nt, Homo sapiens
guagugggccgagccgagugaca

SEQ ID NO: 4147 - RNA, 20 nt, Homo sapiens
caccacauacacucagggac

SEQ ID NO: 4148 - RNA, 21 nt, Homo sapiens
gguggagcccugagaaccgga

SEQ ID NO: 4149 - RNA, 21 nt, Homo sapiens
ccacaggcacgacugguuugg

SEQ ID NO: 4150 - RNA, 22 nt, Homo sapiens
ccacaggcacagccgguuugag

SEQ ID NO: 4151 - RNA, 21 nt, Homo sapiens
ugccaaaccagucgugccugu

SEQ ID NO: 4152 - RNA, 23 nt, Homo sapiens
cuccagccccuccagggcuuccu

SEQ ID NO: 4153 - RNA, 22 nt, Homo sapiens
gcagaggaauggagaguucgga

SEQ ID NO: 4154 - RNA, 20 nt, Homo sapiens
ggcccuuacccccauuccca

SEQ ID NO: 4155 - RNA, 22 nt, Homo sapiens
ucucuacauccccacaucgccu

SEQ ID NO: 4156 - RNA, 21 nt, Homo sapiens
ucauaagcccucugaccacua

SEQ ID NO: 4157 - RNA, 22 nt, Homo sapiens
caggagaaucacugaugucaga

SEQ ID NO: 4158 - RNA, 22 nt, Homo sapiens
ucuaccaguuccugcaggcgcg

SEQ ID NO: 4159 - RNA, 23 nt, Homo sapiens
cuccuacaauaagccccugccca

SEQ ID NO: 4160 - RNA, 22 nt, Homo sapiens
ccuggcccacccgaccccugca

SEQ ID NO: 4161 - RNA, 20 nt, Homo sapiens
gcauguggucgggugcgccu

SEQ ID NO: 4162 - RNA, 22 nt, Homo sapiens
gccccgacguuacucggacuau

SEQ ID NO: 4163 - RNA, 23 nt, Homo sapiens
ccccacgcccgccgcgggcccag

SEQ ID NO: 4164 - RNA, 20 nt, Homo sapiens
ugagcggugagggcauacag

SEQ ID NO: 4165 - RNA, 23 nt, Homo sapiens
cacugugggcccucuccgcacca

SEQ ID NO: 4166 - RNA, 21 nt, Homo sapiens
aacucaacaaccuuaggacag

SEQ ID NO: 4167 - RNA, 21 nt, Homo sapiens
ugcaaguccugagguugaaga

SEQ ID NO: 4168 - RNA, 22 nt, Homo sapiens
cuagaagcucacagucuaguug

SEQ ID NO: 4169 - RNA, 23 nt, Homo sapiens
cccagcuagauuguaagcuccuu

SEQ ID NO: 4170 - RNA, 22 nt, Homo sapiens
cuuacgucucucccuggguccc

SEQ ID NO: 4171 - RNA, 22 nt, Homo sapiens
uauggcagacugugauuuguug

SEQ ID NO: 4172 - RNA, 21 nt, Homo sapiens
cgacgcccggcggggcggaag

SEQ ID NO: 4173 - RNA, 22 nt, Homo sapiens
uuagguagacugggauuuguug

SEQ ID NO: 4174 - RNA, 22 nt, Homo sapiens
agguugagguuaguggcaacag

SEQ ID NO: 4175 - RNA, 22 nt, Homo sapiens
ugcuguuagcccuagccccgca

SEQ ID NO: 4176 - RNA, 22 nt, Homo sapiens
gguuaguggaccaggucacaaa

SEQ ID NO: 4177 - RNA, 22 nt, Homo sapiens
gugugcucucuggucaaccauc

SEQ ID NO: 4178 - RNA, 22 nt, Homo sapiens
gucaaaauuguuugcacucugc

SEQ ID NO: 4179 - RNA, 23 nt, Homo sapiens
acaacaaaaucacuagucuucca

SEQ ID NO: 4180 - RNA, 20 nt, Homo sapiens
uccccacagacccagagccg

SEQ ID NO: 4181 - RNA, 22 nt, Homo sapiens
ugugucaguuucacccugcugc

SEQ ID NO: 4182 - RNA, 22 nt, Homo sapiens
gcucggccccggccccagcccc

SEQ ID NO: 4183 - RNA, 22 nt, Homo sapiens
aggaggacaagugagcaccugc

SEQ ID NO: 4184 - RNA, 21 nt, Homo sapiens
caucaccuuccuucuccucca

SEQ ID NO: 4185 - RNA, 22 nt, Homo sapiens
gcugaggcuguggggcuggagu

SEQ ID NO: 4186 - RNA, 22 nt, Homo sapiens
aagaccagcaccaauuccuccu

SEQ ID NO: 4187 - RNA, 23 nt, Homo sapiens
agaaaccaugggguaugagcaga

SEQ ID NO: 4188 - RNA, 23 nt, Homo sapiens
caugcucagacaaccauggugca

SEQ ID NO: 4189 - RNA, 23 nt, Homo sapiens
aaccaagaccccggagaucccag

SEQ ID NO: 4190 - RNA, 22 nt, Homo sapiens
agcucagaacccagaggucuca

SEQ ID NO: 4191 - RNA, 23 nt, Homo sapiens
uggcccugacacgugguacugga

SEQ ID NO: 4192 - RNA, 23 nt, Homo sapiens
acaaggaugaaucuuuguuacug

SEQ ID NO: 4193 - RNA, 22 nt, Homo sapiens
ucccgggaacucaucagucucc

SEQ ID NO: 4194 - RNA, 21 nt, Homo sapiens
aggagacucacaaguuccugc

SEQ ID NO: 4195 - RNA, 22 nt, Homo sapiens
ucggucccucgggccagggcag

SEQ ID NO: 4196 - RNA, 21 nt, Homo sapiens
cacaaccucaguguuuccagg

SEQ ID NO: 4197 - RNA, 22 nt, Homo sapiens
caccugauaaaacugagguaua

SEQ ID NO: 4198 - RNA, 22 nt, Homo sapiens
ugaauuacuuuguaaaccacca

SEQ ID NO: 4199 - RNA, 22 nt, Homo sapiens
uggugauucacaaagaaaucca

SEQ ID NO: 4200 - RNA, 21 nt, Homo sapiens
cugggaggagggagaagagga

SEQ ID NO: 4201 - RNA, 20 nt, Homo sapiens
cccugcgccaucuccucuac

SEQ ID NO: 4202 - RNA, 22 nt, Homo sapiens
uauccacuacaccccgcugccu

SEQ ID NO: 4203 - RNA, 22 nt, Homo sapiens
agaggcaggguaguguaaugga

SEQ ID NO: 4204 - RNA, 22 nt, Homo sapiens
ccucgggauggcgcccguucac

SEQ ID NO: 4205 - RNA, 22 nt, Homo sapiens
uucacccaaagaggugucaguc

SEQ ID NO: 4206 - RNA, 21 nt, Homo sapiens
ugacugacagcuuuuugagua

SEQ ID NO: 4207 - RNA, 21 nt, Homo sapiens
acaaugguuguccgauauuaa

SEQ ID NO: 4208 - RNA, 21 nt, Homo sapiens
caacugaugccuuuccaagua

SEQ ID NO: 4209 - RNA, 22 nt, Homo sapiens
ucaguggcucagguucguugca

SEQ ID NO: 4210 - RNA, 22 nt, Homo sapiens
ucaaugacucagguaaguugca

SEQ ID NO: 4211 - RNA, 21 nt, Homo sapiens
cuacgcagaaaggacacagug

SEQ ID NO: 4212 - RNA, 22 nt, Homo sapiens
ucuacccagaaaggagccagug

SEQ ID NO: 4213 - RNA, 22 nt, Homo sapiens
uccacucagaaaggaaacagug

SEQ ID NO: 4214 - RNA, 21 nt, Homo sapiens
ugacuggcaccuuucugaaua

SEQ ID NO: 4215 - RNA, 20 nt, Homo sapiens
uacugcuuccacagcucccc

SEQ ID NO: 4216 - RNA, 25 nt, Homo sapiens
gaauccugguucugucccucacuag

SEQ ID NO: 4217 - RNA, 23 nt, Homo sapiens
gacguaguccuauucucugcugc

SEQ ID NO: 4218 - RNA, 20 nt, Homo sapiens
gcaagacaucacaagacucu

SEQ ID NO: 4219 - RNA, 23 nt, Homo sapiens
agcauugcaaccgaucccaaccu

SEQ ID NO: 4220 - RNA, 22 nt, Homo sapiens
guaaugcaacaaauccccaccc

SEQ ID NO: 4221 - RNA, 22 nt, Homo sapiens
acaggccgggacaagugcaaua

SEQ ID NO: 4222 - RNA, 22 nt, Homo sapiens
ggaggccgggacgagugcaaua

SEQ ID NO: 4223 - RNA, 22 nt, Homo sapiens
cacugcaccgcgucccgucccu

SEQ ID NO: 4224 - RNA, 22 nt, Homo sapiens
gggagaggucucccugcgcaca

SEQ ID NO: 4225 - RNA, 22 nt, Homo sapiens
cgggaagugcuagcucagcagu

SEQ ID NO: 4226 - RNA, 22 nt, Homo sapiens
ccagugucuccaguaguagaca

SEQ ID NO: 4227 - RNA, 23 nt, Homo sapiens
gcgguagcggaagcgguaacugg

SEQ ID NO: 4228 - RNA, 23 nt, Homo sapiens
cuaccugcacgaacagcacuuug

SEQ ID NO: 4229 - RNA, 22 nt, Homo sapiens
cugcgauuccucccucuacugu

SEQ ID NO: 4230 - RNA, 22 nt, Homo sapiens
ggcagagagucagagcgcggau

SEQ ID NO: 4231 - RNA, 20 nt, Homo sapiens
ccagccccacccugacucac

SEQ ID NO: 4232 - RNA, 22 nt, Homo sapiens
acuggguucaccuuuaagggca

SEQ ID NO: 4233 - RNA, 21 nt, Homo sapiens
cuggggagcagaggcccaggg

SEQ ID NO: 4234 - RNA, 24 nt, Homo sapiens
cacccccagagccucagcucccca

SEQ ID NO: 4235 - RNA, 22 nt, Homo sapiens
acuuucgguuaucuagcuuuau

SEQ ID NO: 4236 - RNA, 21 nt, Homo sapiens
ggggagcgggggcccugccuu

SEQ ID NO: 4237 - RNA, 23 nt, Homo sapiens
gcacaugugcacacagccgggug

SEQ ID NO: 4238 - RNA, 22 nt, Homo sapiens
cacauggccaaaacagagaaga

SEQ ID NO: 4239 - RNA, 21 nt, Homo sapiens
cuggaggacggcaacagucag

SEQ ID NO: 4240 - RNA, 22 nt, Homo sapiens
cucauccgauguacaauaauuu

SEQ ID NO: 4241 - RNA, 22 nt, Homo sapiens
ugcucaauaaauacccguugaa

SEQ ID NO: 4242 - RNA, 23 nt, Homo sapiens
ucauacagcuagauaaccaaaga

SEQ ID NO: 4243 - RNA, 22 nt, Homo sapiens
cauauuggcacugcacaugauu

SEQ ID NO: 4244 - RNA, 23 nt, Homo sapiens
agcaaaaaugugcuagugccaaa

SEQ ID NO: 4245 - RNA, 22 nt, Homo sapiens
gggaaaguaguaaguuguauag

SEQ ID NO: 4246 - RNA, 22 nt, Homo sapiens
aacaauacaacuuacuaccuca

SEQ ID NO: 4247 - RNA, 22 nt, Homo sapiens
cagacccauagaagcgagcuug

SEQ ID NO: 4248 - RNA, 22 nt, Homo sapiens
cacaagaucggaucuacggguu

SEQ ID NO: 4249 - RNA, 22 nt, Homo sapiens
cggacccacagacacgagcuug

SEQ ID NO: 4250 - RNA, 22 nt, Homo sapiens
cgcaaggucgguucuacgggug

SEQ ID NO: 4251 - DNA, 615 bp, Homo sapiens
atggctggacctgccacccagagccccatgaagctgatggccctgcagctgctgctgtggcacagtgcactctggacagtgcaggaagccacccccctgggccctgccagctccctgccccagagcttcctgctcaagtgcttagagcaagtgaggaagatccagggcgatggcgcagcgctccaggagaagctgtgtgccacctacaagctgtgccaccccgaggagctggtgctgctcggacactctctgggcatcccctgggctcccctgagcagctgccccagccaggccctgcagctggcaggctgcttgagccaactccatagcggccttttcctctaccaggggctcctgcaggccctggaagggatctcccccgagttgggtcccaccttggacacactgcagctggacgtcgccgactttgccaccaccatctggcagcagatggaagaactgggaatggcccctgccctgcagcccacccagggtgccatgccggccttcgcctctgctttccagcgccgggcaggaggggtcctggttgcctcccatctgcagagcttcctggaggtgtcgtaccgcgttctacgccaccttgcccagccctga

SEQ ID NO: 4252 - DNA, 800 bp, Homo sapiens
taatacgactcactatagggaaataagagagaaaagaagagtaagaagaaatataagagccaccatggctggacctgccacccagagccccatgaagctgatggccctgcagctgctgctgtggcacagtgcactctggacagtgcaggaagccacccccctgggccctgccagctccctgccccagagcttcctgctcaagtgcttagagcaagtgaggaagatccagggcgatggcgcagcgctccaggagaagctgtgtgccacctacaagctgtgccaccccgaggagctggtgctgctcggacactctctgggcatcccctgggctcccctgagcagctgccccagccaggccctgcagctggcaggctgcttgagccaactccatagcggccttttcctctaccaggggctcctgcaggccctggaagggatctcccccgagttgggtcccaccttggacacactgcagctggacgtcgccgactttgccaccaccatctggcagcagatggaagaactgggaatggcccctgccctgcagcccacccagggtgccatgccggccttcgcctctgctttccagcgccgggcaggaggggtcctggttgcctcccatctgcagagcttcctggaggtgtcgtaccgcgttctacgccaccttgcccagccctgaagcgctgccttctgcggggcttgccttctggccatgcccttcttctctcccttgcacctgtacctcttggtctttgaataaagcctgagtaggaaggcggccgctcgagcatgcatctaga

SEQ ID NO: 4253 - DNA, 800 bp, Artificial Sequence
  Description of Artificial Sequence: Sythnetic Transcript Seqeunce
taatacgactcactatagggaaataagagagaaaagaagagtaagaagaaatataagagccaccatggccggtcccgcgacccaaagccccatgaaacttatggccctgcagttgctgctttggcactcggccctctggacagtccaagaagcgactcctctcggacctgcctcatcgttgccgcagtcattccttttgaagtgtctggagcaggtgcgaaagattcagggcgatggagccgcactccaagagaagctctgcgcgacatacaaactttgccatcccgaggagctcgtactgctcgggcacagcttggggattccctgggctcctctctcgtcctgtccgtcgcaggctttgcagttggcagggtgcctttcccagctccactccggtttgttcttgtatcagggactgctgcaagcccttgagggaatctcgccagaattgggcccgacgctggacacgttgcagctcgacgtggcggatttcgcaacaaccatctggcagcagatggaggaactggggatggcacccgcgctgcagcccacgcagggggcaatgccggcctttgcgtccgcgtttcagcgcagggcgggtggagtcctcgtagcgagccaccttcaatcatttttggaagtctcgtaccgggtgctgagacatcttgcgcagccgtgaagcgctgccttctgcggggcttgccttctggccatgcccttcttctctcccttgcacctgtacctcttggtctttgaataaagcctgagtaggaaggcggccgctcgagcatgcatctaga

SEQ ID NO: 4254 - RNA, 758 nt, Artificial Sequence
  Description of Artificial Sequence: Sythnetic Transcript Seqeunce
gggaaauaagagagaaaagaagaguaagaagaaauauaagagccaccauggccggucccgcgacccaaagccccaugaaacuuauggcccugcaguugcugcuuuggcacucggcccucuggacaguccaagaagcgacuccucucggaccugccucaucguugccgcagucauuccuuuugaagugucuggagcaggugcgaaagauucagggcgauggagccgcacuccaagagaagcucugcgcgacauacaaacuuugccaucccgaggagcucguacugcucgggcacagcuuggggauucccugggcuccucucucguccuguccgucgcaggcuuugcaguuggcagggugccuuucccagcuccacuccgguuuguucuuguaucagggacugcugcaagcccuugagggaaucucgccagaauugggcccgacgcuggacacguugcagcucgacguggcggauuucgcaacaaccaucuggcagcagauggaggaacuggggauggcacccgcgcugcagcccacgcagggggcaaugccggccuuugcguccgcguuucagcgcagggcggguggaguccucguagcgagccaccuucaaucauuuuuggaagucucguaccgggugcugagacaucuugcgcagccgugaagcgcugccuucugcggggcuugccuucuggccaugcccuucuucucucccuugcaccuguaccucuuggucuuugaauaaagccugaguaggaag

SEQ ID NO: 4255 - protein, 207 aa, Homo sapiens
MAGPATQSPMKLMALQLLLWHSALWTVQEATPLGPASSLPQSFLLKCLEQVRKIQGDGAALQEKLVSECATYKLCHPEELVLLGHSLGIPWAPLSSCPSQALQLAGCLSQLHSGLFLYQGLLQALEGISPELGPTLDTLQLDVADFATTIWQQMEELGMAPALQPTQGAMPAFASAFQRRAGGVLVASHLQSFLEVSYRVLRHLAQP

SEQ ID NO: 4256 - DNA, 27 bp, Homo sapiens
ttggaccctcgtacagaagctaatacg

SEQ ID NO: 4257 - DNA, 149 bp, Homo sapiens
ttttttttttttttttttttttttttttttttttttttttttttttttttttttttttttttttttttttttttttttttttttttttttttttttttttttttttttttttttttttttcttcctactcaggctttattcaaagacca

SEQ ID NO: 4258 - DNA, 29 bp, Homo sapiens
cttcctactcaggctttattcaaagacca

SEQ ID NO: 4259 - DNA, 20 bp, Homo sapiens
tggccggtcccgcgacccaa

SEQ ID NO: 4260 - DNA, 20 bp, Homo sapiens
gcttcacggctgcgcaagat

SEQ ID NO: 4261 - DNA, 803 bp, Artificial Sequence
  Description of Artificial Sequence: Sythnetic Transcript Seqeunce
taatacgactcactatagggaaataagagagaaaagaagagtaagaagaaatataagagccaccatggccggtcccgcgacccaaagccccatgaaacttatggccctgcagttgctgctttggcactcggccctctggacagtccaagaagcgactcctctcggacctgcctcatcgttgccgcagtcattccttttgaagtgtctggagcaggtgcgaaagattcagggcgatggagccgcactccaagagaagctctgcgcgacatacaaactttgccatcccgaggagctcgtactgctcgggcacagcttggggattccctgggctcctctctcgtcctgtccgtcgcaggctttgcagttggcagggtgcctttcccagctccactccggtttgttcttgtatcagggactgctgcaagcccttgagggaatctcgccagaattgggcccgacgctggacacgttgcagctcgacgtggcggatttcgcaacaaccatctggcagcagatggaggaactggggatggcacccgcgctgcagcccacgcagggggcaatgccggcctttgcgtccgcgtttcagcgcagggcgggtggagtcctcgtagcgagccaccttcaatcatttttggaagtctcgtaccgggtgctgagacatcttgcgcagccgtgatgataagctgccttctgcggggcttgccttctggccatgcccttcttctctcccttgcacctgtacctcttggtctttgaataaagcctgagtaggaaggcggccgctcgagcatgcatctaga

SEQ ID NO: 4262 - RNA, 761 nt, Artificial Sequence
  Description of Artificial Sequence: Sythnetic Transcript Seqeunce
gggaaauaagagagaaaagaagaguaagaagaaauauaagagccaccauggccggucccgcgacccaaagccccaugaaacuuauggcccugcaguugcugcuuuggcacucggcccucuggacaguccaagaagcgacuccucucggaccugccucaucguugccgcagucauuccuuuugaagugucuggagcaggugcgaaagauucagggcgauggagccgcacuccaagagaagcucugcgcgacauacaaacuuugccaucccgaggagcucguacugcucgggcacagcuuggggauucccugggcuccucucucguccuguccgucgcaggcuuugcaguuggcagggugccuuucccagcuccacuccgguuuguucuuguaucagggacugcugcaagcccuugagggaaucucgccagaauugggcccgacgcuggacacguugcagcucgacguggcggauuucgcaacaaccaucuggcagcagauggaggaacuggggauggcacccgcgcugcagcccacgcagggggcaaugccggccuuugcguccgcguuucagcgcagggcggguggaguccucguagcgagccaccuucaaucauuuuuggaagucucguaccgggugcugagacaucuugcgcagccgugaugauaagcugccuucugcggggcuugccuucuggccaugcccuucuucucucccuugcaccuguaccucuuggucuuugaauaaagccugaguaggaag

SEQ ID NO: 4263 - DNA, 825 bp, Artificial Sequence
  Description of Artificial Sequence: Sythnetic Transcript Seqeunce
taatacgactcactatagggaaataagagagaaaagaagagtaagaagaaatataagagccaccatggccggtcccgcgacccaaagccccatgaaacttatggccctgcagttgctgctttggcactcggccctctggacagtccaagaagcgactcctctcggacctgcctcatcgttgccgcagtcattccttttgaagtgtctggagcaggtgcgaaagattcagggcgatggagccgcactccaagagaagctctgcgcgacatacaaactttgccatcccgaggagctcgtactgctcgggcacagcttggggattccctgggctcctctctcgtcctgtccgtcgcaggctttgcagttggcagggtgcctttcccagctccactccggtttgttcttgtatcagggactgctgcaagcccttgagggaatctcgccagaattgggcccgacgctggacacgttgcagctcgacgtggcggatttcgcaacaaccatctggcagcagatggaggaactggggatggcacccgcgctgcagcccacgcagggggcaatgccggcctttgcgtccgcgtttcagcgcagggcgggtggagtcctcgtagcgagccaccttcaatcatttttggaagtctcgtaccgggtgctgagacatcttgcgcagccgtgatgataagctgccttctgcggggcttgccttctggccatgcccttcttctctcccttgcacctgtacctctcaaacaccattgtcacactccatggtctttgaataaagcctgagtaggaaggcggccgctcgagcatgcatctaga

SEQ ID NO: 4264 - RNA, 783 nt, Artificial Sequence
  Description of Artificial Sequence: Sythnetic Transcript Seqeunce
gggaaauaagagagaaaagaagaguaagaagaaauauaagagccaccauggccggucccgcgacccaaagccccaugaaacuuauggcccugcaguugcugcuuuggcacucggcccucuggacaguccaagaagcgacuccucucggaccugccucaucguugccgcagucauuccuuuugaagugucuggagcaggugcgaaagauucagggcgauggagccgcacuccaagagaagcucugcgcgacauacaaacuuugccaucccgaggagcucguacugcucgggcacagcuuggggauucccugggcuccucucucguccuguccgucgcaggcuuugcaguuggcagggugccuuucccagcuccacuccgguuuguucuuguaucagggacugcugcaagcccuugagggaaucucgccagaauugggcccgacgcuggacacguugcagcucgacguggcggauuucgcaacaaccaucuggcagcagauggaggaacuggggauggcacccgcgcugcagcccacgcagggggcaaugccggccuuugcguccgcguuucagcgcagggcggguggaguccucguagcgagccaccuucaaucauuuuuggaagucucguaccgggugcugagacaucuugcgcagccgugaugauaagcugccuucugcggggcuugccuucuggccaugcccuucuucucucccuugcaccuguaccucucaaacaccauugucacacuccauggucuuugaauaaagccugaguaggaag

SEQ ID NO: 4265 - DNA, 863 bp, Artificial Sequence
  Description of Artificial Sequence: Sythnetic Transcript Seqeunce
taatacgactcactatagggaaataagagagaaaagaagagtaagaagaaatataagagccaccatggccggtcccgcgacccaaagccccatgaaacttatggccctgcagttgctgctttggcactcggccctctggacagtccaagaagcgactcctctcggacctgcctcatcgttgccgcagtcattccttttgaagtgtctggagcaggtgcgaaagattcagggcgatggagccgcactccaagagaagctctgcgcgacatacaaactttgccatcccgaggagctcgtactgctcgggcacagcttggggattccctgggctcctctctcgtcctgtccgtcgcaggctttgcagttggcagggtgcctttcccagctccactccggtttgttcttgtatcagggactgctgcaagcccttgagggaatctcgccagaattgggcccgacgctggacacgttgcagctcgacgtggcggatttcgcaacaaccatctggcagcagatggaggaactggggatggcacccgcgctgcagcccacgcagggggcaatgccggcctttgcgtccgcgtttcagcgcagggcgggtggagtcctcgtagcgagccaccttcaatcatttttggaagtctcgtaccgggtgctgagacatcttgcgcagccgtgatgataagctgccttctgcggggcttgccttctggccatgcccttcttctctcccttgcacctgtacctctcaaacaccattgtcacaaacaccattgtcacaaacaccattgtcacaaacaccattgtcatggtctttgaataaagcctgagtaggaaggcggccgctcgagcatgcatctaga

SEQ ID NO: 4266 - RNA, 821 nt, Artificial Sequence
  Description of Artificial Sequence: Sythnetic Transcript Seqeunce
gggaaauaagagagaaaagaagaguaagaagaaauauaagagccaccauggccggucccgcgacccaaagccccaugaaacuuauggcccugcaguugcugcuuuggcacucggcccucuggacaguccaagaagcgacuccucucggaccugccucaucguugccgcagucauuccuuuugaagugucuggagcaggugcgaaagauucagggcgauggagccgcacuccaagagaagcucugcgcgacauacaaacuuugccaucccgaggagcucguacugcucgggcacagcuuggggauucccugggcuccucucucguccuguccgucgcaggcuuugcaguuggcagggugccuuucccagcuccacuccgguuuguucuuguaucagggacugcugcaagcccuugagggaaucucgccagaauugggcccgacgcuggacacguugcagcucgacguggcggauuucgcaacaaccaucuggcagcagauggaggaacuggggauggcacccgcgcugcagcccacgcagggggcaaugccggccuuugcguccgcguuucagcgcagggcggguggaguccucguagcgagccaccuucaaucauuuuuggaagucucguaccgggugcugagacaucuugcgcagccgugaugauaagcugccuucugcggggcuugccuucuggccaugcccuucuucucucccuugcaccuguaccucucaaacaccauugucacaaacaccauugucacaaacaccauugucacaaacaccauugucauggucuuugaauaaagccugaguaggaag

SEQ ID NO: 4267 - protein, 30 aa, Homo sapiens; identical to SEQ ID NO: 95

SEQ ID NO: 4268 - protein, 25 aa, Homo sapiens
MMPSSVSWGILLLAGLCCLVPVSLA

SEQ ID NO: 4269 - protein, 46 aa, Homo sapiens; identical to SEQ ID NO: 96

SEQ ID NO: 4270 - protein, 21 aa, Homo sapiens
MKGSLLLLLVSNLLLCQSVAP

SEQ ID NO: 4271 - protein, 24 aa, Homo sapiens
MKWVTFISLLFLFSSAYSRGVFRR

SEQ ID NO: 4272 - DNA, 110 bp, Homo sapiens
gctggagcctcggtggccatgcttcttgccccttgggcctccccccagcccctcctccccttcctgcacccgtacccccgtggtctttgaataaagtctgagtgggcggc

SEQ ID NO: 4273 - protein, 9 aa, Homo sapiens
PVAIIELEL

SEQ ID NO: 4274 - protein, 10 aa, Homo sapiens
VNQILKTLSE

SEQ ID NO: 4275 - protein, 7 aa, Homo sapiens
PKKKRKV

SEQ ID NO: 4276 - DNA, 47 bp, Artificial Sequence
  Description of Artificial Sequence: Sythnetic Transcript Seqeunce
gggagatcagagagaaaagaagagtaagaagaaatataagagccacc

SEQ ID NO: 4277 - DNA, 145 bp, Artificial Sequence
  Description of Artificial Sequence: Sythnetic Transcript Seqeunce
ggaataaaagtctcaacacaacatatacaaaacaaacgaatctcaagcaatcaagcattctacttctattgcagcaatttaaatcatttcttttaaagcaaaagcaattttctgaaaattttcaccatttacgaacgatagcaac

SEQ ID NO: 4278 - RNA, 42 nt, Artificial Sequence
  Description of Artificial Sequence: Sythnetic Transcript Seqeunce
gggagacaagcuuggcauuccgguacuguugguaaagccacc

SEQ ID NO: 4279 - DNA, 47 bp, Artificial Sequence
  Description of Artificial Sequence: Sythnetic Transcript Seqeunce
gggaattaacagagaaaagaagagtaagaagaaatataagagccacc

SEQ ID NO: 4280 - DNA, 47 bp, Artificial Sequence
  Description of Artificial Sequence: Sythnetic Transcript Seqeunce
gggaaattagacagaaaagaagagtaagaagaaatataagagccacc

SEQ ID NO: 4281 - DNA, 47 bp, Artificial Sequence
  Description of Artificial Sequence: Sythnetic Transcript Seqeunce
gggaaataagagagtaaagaacagtaagaagaaatataagagccacc

SEQ ID NO: 4282 - DNA, 47 bp, Artificial Sequence
  Description of Artificial Sequence: Sythnetic Transcript Seqeunce
gggaaaaaagagagaaaagaagactaagaagaaatataagagccacc

SEQ ID NO: 4283 - DNA, 47 bp, Artificial Sequence
  Description of Artificial Sequence: Sythnetic Transcript Seqeunce
gggaaataagagagaaaagaagagtaagaagatatataagagccacc

SEQ ID NO: 4284 - DNA, 47 bp, Artificial Sequence
  Description of Artificial Sequence: Sythnetic Transcript Seqeunce
gggaaataagagacaaaacaagagtaagaagaaatataagagccacc

SEQ ID NO: 4285 - DNA, 47 bp, Artificial Sequence
  Description of Artificial Sequence: Sythnetic Transcript Seqeunce
gggaaattagagagtaaagaacagtaagtagaattaaaagagccacc

SEQ ID NO: 4286 - DNA, 47 bp, Artificial Sequence
  Description of Artificial Sequence: Sythnetic Transcript Seqeunce
gggaaataagagagaatagaagagtaagaagaaatataagagccacc

SEQ ID NO: 4287 - DNA, 47 bp, Artificial Sequence
  Description of Artificial Sequence: Sythnetic Transcript Seqeunce
gggaaataagagagaaaagaagagtaagaagaaaattaagagccacc

SEQ ID NO: 4288 - DNA, 47 bp, Artificial Sequence
  Description of Artificial Sequence: Sythnetic Transcript Seqeunce
gggaaataagagagaaaagaagagtaagaagaaatttaagagccacc

SEQ ID NO: 4289 - RNA, 778 nt, Artificial Sequence
  Description of Artificial Sequence: Synthetic Transcript Sequence
gggaaauaagagagaaaagaagaguaagaagaaauauaagagccaccauggccggucccgcgacccaaagccccaugaaacuuauggcccugcaguugcugcuuuggcacucggcccucuggacaguccaagaagcgacuccucucggaccugccucaucguugccgcagucauuccuuuugaagugucuggagcaggugcgaaagauucagggcgauggagccgcacuccaagagaagcucugcgcgacauacaaacuuugccaucccgaggagcucguacugcucgggcacagcuuggggauucccugggcuccucucucguccuguccgucgcaggcuuugcaguuggcagggugccuuucccagcuccacuccgguuuguucuuguaucagggacugcugcaagcccuugagggaaucucgccagaauugggcccgacgcuggacacguugcagcucgacguggcggauuucgcaacaaccaucuggcagcagauggaggaacuggggauggcacccgcgcugcagcccacgcagggggcaaugccggccuuugcguccgcguuucagcgcagggcggguggaguccucguagcgagccaccuucaaucauuuuuggaagucucguaccgggugcugagacaucuugcgcagccgugauaauaggcuggagccucgguggccaugcuucuugccccuugggccuccccccagccccuccuccccuuccugcacccguacccccguggucuuugaauaaagucugagugggcggc

SEQ ID NO: 4290 - RNA, 778 nt, Artificial Sequence
  Description of Artificial Sequence: Synthetic Transcript Sequence
gggaauuaacagagaaaagaagaguaagaagaaauauaagagccaccauggccggucccgcgacccaaagccccaugaaacuuauggcccugcaguugcugcuuuggcacucggcccucuggacaguccaagaagcgacuccucucggaccugccucaucguugccgcagucauuccuuuugaagugucuggagcaggugcgaaagauucagggcgauggagccgcacuccaagagaagcucugcgcgacauacaaacuuugccaucccgaggagcucguacugcucgggcacagcuuggggauucccugggcuccucucucguccuguccgucgcaggcuuugcaguuggcagggugccuuucccagcuccacuccgguuuguucuuguaucagggacugcugcaagcccuugagggaaucucgccagaauugggcccgacgcuggacacguugcagcucgacguggcggauuucgcaacaaccaucuggcagcagauggaggaacuggggauggcacccgcgcugcagcccacgcagggggcaaugccggccuuugcguccgcguuucagcgcagggcggguggaguccucguagcgagccaccuucaaucauuuuuggaagucucguaccgggugcugagacaucuugcgcagccgugauaauaggcuggagccucgguggccaugcuucuugccccuugggccuccccccagccccuccuccccuuccugcacccguacccccguggucuuugaauaaagucugagugggcggc

SEQ ID NO: 4291 - RNA, 778 nt, Artificial Sequence
  Description of Artificial Sequence: Synthetic Transcript Sequence
gggaaauuagacagaaaagaagaguaagaagaaauauaagagccaccauggccggucccgcgacccaaagccccaugaaacuuauggcccugcaguugcugcuuuggcacucggcccucuggacaguccaagaagcgacuccucucggaccugccucaucguugccgcagucauuccuuuugaagugucuggagcaggugcgaaagauucagggcgauggagccgcacuccaagagaagcucugcgcgacauacaaacuuugccaucccgaggagcucguacugcucgggcacagcuuggggauucccugggcuccucucucguccuguccgucgcaggcuuugcaguuggcagggugccuuucccagcuccacuccgguuuguucuuguaucagggacugcugcaagcccuugagggaaucucgccagaauugggcccgacgcuggacacguugcagcucgacguggcggauuucgcaacaaccaucuggcagcagauggaggaacuggggauggcacccgcgcugcagcccacgcagggggcaaugccggccuuugcguccgcguuucagcgcagggcggguggaguccucguagcgagccaccuucaaucauuuuuggaagucucguaccgggugcugagacaucuugcgcagccgugauaauaggcuggagccucgguggccaugcuucuugccccuugggccuccccccagccccuccuccccuuccugcacccguacccccguggucuuugaauaaagucugagugggcggc

SEQ ID NO: 4292 - RNA, 778 nt, Artificial Sequence
  Description of Artificial Sequence: Synthetic Transcript Sequence
gggaaauuagagaguaaagaacaguaaguagaauuaaaagagccaccauggccggucccgcgacccaaagccccaugaaacuuauggcccugcaguugcugcuuuggcacucggcccucuggacaguccaagaagcgacuccucucggaccugccucaucguugccgcagucauuccuuuugaagugucuggagcaggugcgaaagauucagggcgauggagccgcacuccaagagaagcucugcgcgacauacaaacuuugccaucccgaggagcucguacugcucgggcacagcuuggggauucccugggcuccucucucguccuguccgucgcaggcuuugcaguuggcagggugccuuucccagcuccacuccgguuuguucuuguaucagggacugcugcaagcccuugagggaaucucgccagaauugggcccgacgcuggacacguugcagcucgacguggcggauuucgcaacaaccaucuggcagcagauggaggaacuggggauggcacccgcgcugcagcccacgcagggggcaaugccggccuuugcguccgcguuucagcgcagggcggguggaguccucguagcgagccaccuucaaucauuuuuggaagucucguaccgggugcugagacaucuugcgcagccgugauaauaggcuggagccucgguggccaugcuucuugccccuugggccuccccccagccccuccuccccuuccugcacccguacccccguggucuuugaauaaagucugagugggcggc

SEQ ID NO: 4293 - RNA, 778 nt, Artificial Sequence
  Description of Artificial Sequence: Synthetic Transcript Sequence
gggaaauaagagagaauagaagaguaagaagaaauauaagagccaccauggccggucccgcgacccaaagccccaugaaacuuauggcccugcaguugcugcuuuggcacucggcccucuggacaguccaagaagcgacuccucucggaccugccucaucguugccgcagucauuccuuuugaagugucuggagcaggugcgaaagauucagggcgauggagccgcacuccaagagaagcucugcgcgacauacaaacuuugccaucccgaggagcucguacugcucgggcacagcuuggggauucccugggcuccucucucguccuguccgucgcaggcuuugcaguuggcagggugccuuucccagcuccacuccgguuuguucuuguaucagggacugcugcaagcccuugagggaaucucgccagaauugggcccgacgcuggacacguugcagcucgacguggcggauuucgcaacaaccaucuggcagcagauggaggaacuggggauggcacccgcgcugcagcccacgcagggggcaaugccggccuuugcguccgcguuucagcgcagggcggguggaguccucguagcgagccaccuucaaucauuuuuggaagucucguaccgggugcugagacaucuugcgcagccgugauaauaggcuggagccucgguggccaugcuucuugccccuugggccuccccccagccccuccuccccuuccugcacccguacccccguggucuuugaauaaagucugagugggcggc
